United States Patent Application Publication US 2026/0258423 A1 - sequence listing, part 11

SEQ ID NO: 167803 - DNA, 46709983 bp, Homo sapiens (residues 6,672,857-8,341,070 of 46,709,983)
  source 1..46709983: mol_type = genomic DNA
gagacttgaaatgcacgtgctctttcccttacctgggtctgttgtataatgcatcttagcagctatgtaacagtacgaattagaatatttagacatctttttagcaactttttaacctgcatttttgtaacgcggtaaagaccttcatcccatccctgagcccctctctcacaacactgcaccccactgctgaccacactgttgtgtgaccattaggaatcaggggggcagcgggggctggaaataaataagaaaggattatgtttcccaaatttgctcaccttagaaagtctcctcaaccattctgtgtgaggtgatttttccaaggtaattgtgccctgactgcgctggatgtcagtgtgtcttgtctttttgaaaatcactggattactctcatgaacggggtatttctctttctatttgaaaatggtcaactgtcctctgcaggtgtcctgacttgctagtttagaccctgaaggtagcggtgagaaaatatttgggccacatcagaatacctattctcagctggaggatatatagaaatttcttaataatatctaaccattttctcaataaccattatatttaacattgatagcttggagggcagggaaggacacagatgacacaatcttcaaagtttaatttagttataaggttttttttttgttcttgcttagttttgcttagtttttggatacaaggtcttgctctggtgcccaggctggagggcagtggcataatgataactcataatttggttgtaacggttctttaaaatatatttttgctgagagtgctagctcatacctgtaatctaaacactttgggtggccaaggtgggatgatcgcttgatcccaggagttcaagacgagtctgagcaacataagtaggctcagtctctagaaaaatatttaaaaattgtctgggtgtagctttgcatgcctgtagtcccagctacttgagaggctgatttgaaagcatcactggagcctaagaatttgaagatgcagtgacccatgattcagccactgcattgacagagtgagatatgtgtgtgtctgtctgtgtgtgtgtataaagaatttgtatgtgaaaaaaattcaagcacaggagaaaagtgaaagcccatggtgggggatgtggagaaaggtcactgtggctccagcaactcagtgagacttggttttccatcttgaagaattgcccatccacactgacaccatagcctaacatatgccagttctcacactacacctgctgggataccagtatgtagccttttgaaaaaaataaaatctttcacctaagagaaggacaagagaaaacgagggtttcacatctaaagccttcattttctttatgaatcaacagccacttgtcatttcaattgtccagaggcgactgacagcactaatacacttaatgaatcaaccaggaaaaatgggcctctcaggtgaggaggaggcacaatcgtcacaaaacccaatccgttctcagctttgcatggtgctcgcatctcaagaagtggtgttagccatgtgaaccgtgttcactggacaaggccagaggaaagaatatgtagtacaacacaactatggggctgcaaatcaaactggtagtgagagcatgcatgaggcttcagtggccgagacactggtggctacccttcggtgtcacttaaatctttgaggtgaaggacatctttttcccaactggctcagagaaactaatcaacattaaaattgagatttgtttttcttttcaaaatttctaagacatagaggactctctaacactccaaaagacattcagctatacatgcagctgaggacctgcctgctctgtagagggatggcagagcagcagccaccagctttagtagctttaagctcctcttctcataggaacaggccacccccacacaacccccctaacttcataggctctggctgtcaggtgcacctgggggactgtcttcctcccatctcattagctctcgaagacagttcagctcaatgtaaaacctaccttaggatggtgagttgtaggctctcctctattctcccagcgcagtgtgacttctggagagtgcttctccatcctcttacctcagatgatgtgaaaagagccggttcccgggcagttagatgttcagtgacataacaggcccagcatgcgcagggcctggccccacaacctggcacctctcccttacctggccttcaggctggacttttctcttctgccacaaatgtcaggtgatgatcacctctgccacactctcatgagcttggtaagtatcaggggtgtaaaccccaacagatttcctgtgactctaccctcttaccacccactcaagtgacattataagcataattttacatttgatattatttatgcgtaattttttttataacatttctgacaacagcccacacaacgaaatgagtctgggttacagaacacacgggcgaggctggggtagcaggcttcaattactttattccaatgtgaaatgaagattgatgatttaaaaacaagacaaagttgtttatcagctgtggggtggctacacttgctagctcatgctcactttctttgaaacaaggtatctgtacagaccatactcataagtagctcttcacaaaaccccagacagaagtcccagtcagacacagctccctcaggctcacagggcagcaacctcctcctccatgttaggctctgacagcaggcaagggaagaagcacaggcagcaggggacagggagatgtcccggactgtagggatccccaaatgccccagagctattatctgtagaagggtgcacgcaggtctcactctgacagtgcagtggctgaatcatgggtcactgcagcctcaaactcttagcctccagtgatgctttcacctcagcctctcaagtagctgtatggcaaaaagcctcctatttttttacttaaaacctggacttcaagccaggttggacctggggatagtggcagcaaaagcagcagccaaatgtatacactccagatgtctacactcatgggcacaggcatattccactcttgctggagcacgagaggcctgagaggcacctgtttcccagttgctaactgatgcccacacaccccattcacgtgtcttcatttaggtctctgcatcgtgtattccctcagccagtgcaaacacatcttctggggggcatcattaattgcagcacctgcccctcttgttctgggagggagtcaagaggaatctggtcagctcctaatcccccaggacaaaggtgctgcccccttttcagcactcacatccagcaatgccatctctggatgggtttttcaaacacaagtagcatgaggtagcaagcatggtgtgacaggctcagggccatgggcagccggttgctggagaagcagcacagggcaggcacatctgtgggtggcaccatgacaagccaaggcagccacagcccctaatcccaacagctccagcccagttggcattcaaatcttcccagatagtattggggtacgcgatgcccatcactcgcccgctcattagcacggccttgttggttactcagagactaaggagagagagtgggggatgtagatccagggtgggcaccgccttgcagccagagtccacctgactgcaggccagcaagcaagcccaagcagctcagctctagtcacctctggctgtactttatgtgtatactttacacaaaggtagcaaacagaggtcaacattagctgttgtgacatgaaagtctatgcctcattaagaccttaaaatgctgttgtcttaagctctctttattccactaaaatttatacaaataaacacatgcaagctgaaactactataaaggaaatattaggattttttaaacccataaacagacatgaaaacagtcactgtttgattgcagagaaagtgagcttctaaagcagctgaccacaaaacagcctcaccaaaccccaggcaggccaggcagtctgaacactacaaggccacgtgatggtcacagaggatgacagctcccgtgagtattgcaaggcactgtgttagcttctcactcacagtctcagaataccctgtgaggggaggccccgtctcactagagcacaggaggttcctgagctcttcccagaaaatggtcatcaaacgatggagcagagggaagcccagacagaacaagtgagtccctagggtctccttaacctccctcagctcctccacatgggtccctgagggaaagtgagcagcctcctaacccccttgatagggttccagtcctgcaggtcggactctctcattttatgctaccatagggggtgacaatgcaaccccaggccccttatttgccatccctcaatgccaggccaggcccagagccctttgctaacacagcccaggggatgctcaaggcccacctcggcacagtcacctgtagtgtactgagatgagcaaggaggtgcaagtagacacaaatccccatgggcttggcctcagccatgttccacaggctcagggcctcgcagatgagctcacagccctccttcaggaagcctgcagatcacaccctcagggagcagtgctcagatgagcaggcaggccccacatcccccaccccatgacgctctgttccactttgcaggcttctgcattggccagtccccactgctttctggtgagatgtccgagttgaagtgaatgttgaaggccacacagctgatggagctcactgccttgcacatgttgtaaatcacctcctggcttcaagggtcagctgtggagacacagcttgatgggaggtaggcccactccaccatcagtggtgctgggttgccctgatctgcaccttccagatacttgctaagatatctgcatgcttctctaagggactgggtcacgagacacccctggcaaggaccagctggcagaacaggctggacactctccctcagcctccccagcagccccacctgtgctgtcatctgtgctgatgatctccgtggtaagattatgggaaacttttacagcaagttttcctttctcacttccctatcttaataacagcactgataacttttaagccctagcaagctgaaactgcaagacacatgatcttctgccttagaagggccatgtttgggcagtgggtgcccaggtgagagccccatggttgttagtggcagccgggagctggatgggcctgccccatagcctagtgaaaagtgggaccctctccttccagagcatggaagtctcagaggctggaaaaaggtgcctaagtggcctgccaaaaagcataaggctagaaggcctggaaagagccccaacagccttcaagctgcctgagagggctgggctcattccagctttctttgctttcatcctgttagcaagaaaacctgctcacagatggcaggcgggcctgaggctgccattccctcatcaggggctataggcacctttaatgtggctctttcttgaagcagctgctcaggccggttctcgaagagcagttccctcattatccacaggtccttcttccagccccgtgtctgcagagggactagggagggagacaagggctcagcctgtgccccacaacctgctttgagacatctcttttgttacttcctcacagacagcctgaaacttccaaatgaacagaccagaatggagcctccaggaaagtgtacagaattctgtctagtacccagaaggaagggggttcccagtgaaggcagggccaggctgcatgcacctcttcaaaaatgttctcctcatagtccacgctcaaggtgtacatcctctgtgtgcttgcagtccatggcagcctctgccttgggaacagtccagctgcacacctgcaatatggtggtgaccctcttgaatggatggttctgggccccattgcagacagcagatagggagatgctcagcccatcaagcccagagccctgccacaggcttctgtgaggcctccacctgctctgggttcttgccctgagaggctgccctgaagtcaaacagaagcaggtgggactctcttccacagctgctctctctcccactgacagctccctagagggtaactcagacagagaagatagaattctcaggcagaaggacaggagtttcggctgccgattcattccatacccccacatgacatgacacaaggcaggggctgtgggacaaaggcattgcctttccttctggcaagaggaatgccttaggaagcaggtctggtggggctagggttgagcgataggcttcaggccacaaggagtggatggacactgagcaagtatcctggttatctgtccacagatccagaacaagtggcatcccaggagcctgggaggggctggcagagacttactgtgtccagcaaaagccccatgtggatgcggtaatgctgcctgctggtccttgtctgtaattacaaacaggtacatgaggtccccatggatcttgcagctctcagggagtgggttccagctgctcatgttaggcacttttagtcactgaacgtgcttcaggaatggccaagtttgattaagccaggcgtcttgctgtgagaccctccacccaactgaggaccctcttccttgtcccccctgacagtttaccttccagttctggttctggagacacgatggcccttcttgggcccctgggagaatgtgctcagatgacacacagtcgacagggcccatttccaagccattcttccatttcccactgtttgaggggccgaggccggtgatcagcacagggccacccagggccagctgtctgcacctaaacgtcatgttggtctggatgtctcagggccagaactctccaggtaagatggcctggtcctcagcacctggcctccatgctcctttttcctctgttcaatcctggccccaatgcctcccgcaactctcaggtcaccattggagaagatgctcaggaagaacaaggagctgcagtcaaccctgctgaaggtggcatatgggtccaggctcttgagctggtcttcgacatggtacatgtggatgcaggctttgagcagtgtgagtagctctttccggaaggaggggaaaacggtgttaccagggtcctacaccctagaacgacccatctagcacagaaaacagtttgcaacgtgctattatgtgtgattttaattttgggctttaggctttcatttccaaattccacaataaacacataaggtggggttctgatttcaacacacacacacacacacacacacacacacacacacacacacacattctctctctcttcctctctcttagaatcttccagtgaattcacactgaaagccgaagtcctcccagaatcttgtgagaacctaaatgatctgaatagtttgtcattgcttttagggatctgggaaaatctctgcacatttctggagaccgctgttatgccatttttaataaatctgttgtgcttcaattcagaagtgtgtgaggggagttgtggaggaattggcatttgggttagaaattccaggaacaacagagacagatgacacctgttttctgcttcataatgtcaagttttatgaaggctaaaacctaattctacaaaaaaaattagactgaaaaactttataggcaaaaattatcttattaaataggaaaatctaattattttattttaaaattttcttttccttagtaggacctaatcatagaaatttaaacactgtatgccaacagcctctactgtaggatggtttattgtaagtactcattttacagatttcttacaaaaactttttccgtaagagaaattagaatattgttcaacatatattgaattcacaattattaccttatttctcacttattattttatgattctgttttctttaatatgaagattactatgactgtgttttcactttctgaattatcatgtgtcacatttttctgtaatttcagtttgagaagttgtaaaacagcatgctcaaatgtatatgttatgtatcaattatataattaattattaaaatatttggcttgtatgtttaattgactctaggcacaatattactattagcattttcttccagttttcccaacttttatttgactaatagtacaatttatttccagtttttattttatctgtcaatgttttatactgtatttacaatatttatattgttaccatatgtaaaaatgtaagacctttctattaaaggctagattacagccttacccttttgtgtaaggaaagaagcaatgcatcagtagcataatttaaaactttctctagtattacttaaatttttattccttaaaactttctcatcacatctctttttaataattataatatggtttctttgaaatgttgttgccctaattgtatccaagtaattcaaaatttatactttttatggattcaaaggaagagttgaaaattgtagttacctaggattctttttcagttggacactatgtttattcaggattttatagatcaaagtttctcttaattatgttttagaatttatgtttctgtattttttagagtaggctgtctcacagcagttaattgtgtttttactttctacctatttattatgattttgaattacattattcaagtaagaattcggggaaggtttcttttaagtttgttttgcaattttgcatttctgtgtttcatgttttagggtagggcaccttacatcagtttattgtttttagtttgaatttatataatataattttctatgacaatattcaaatctgtacagcttaagacagtgtgaggcaaaaaatatgaagcatccctatggtcttttgttaatataatgatttaattgtttgtttgcttgtataaatattgcccctattttgtttatgacttgtgtattttcttcttgtttgatggacaataattgattctgtctaagtgagtaatcatggaaattgtcttaatttcaacatctattgtttatattatcctagtgtgaaagaaagacttatgcgatttgaagataatttttcaaaaactttgtaactctctctcttcaggtgtctttacttatttattttttgacagactctcaccctgtcgccaaagtgcagtggcacaatcttggctcactgcaacctccacctcccaggttaaagcaattctccagctgctgcctcttgagtagctggcattaaaagtgtgcactaccacgcctggttaatttttgtgtttttcatagagctggggtttcaccatgttggccaggctggtcttgaactcatggcctcaagtaatctgcatgcctcagcctcccagagtgctgagattacaggcatgagccatctctcttggcccttgggtgtcatttttaatttcgattgtggtaaaaatacataacataaaatttagaatctttaatattttttcttatacagttcagtcatgttaatgtatttacattgctttgcaacatatttgtaaaacttttttcttttgcaaaactgaaactcaggacacatgaaatgacaactacccattttccttacaacctggctcctgataaaaatcattctattttctgtttctaagtttcaatactttagatattacatataagtagaatcatagagtatctgttttattgtgactaattttacttagcatcatgttctcaagatttctctttattgtggatggtacaagattttctgcctttaaaagctgagtaatattccattacttttgtattacaaattatatttatttattcattctatgaggaaagtttgtgttgctttcacctattggcctttgtgaataatgctgcaatgaatattggtatgcaaatagctatttgctcatatgtatgaggtttacatgtgtgctaccttctgttttattggaaaaattgtctgtctttatgctagaaacaaactgttttcattgctgttgctttgtaatgtgctttgaaatcagaaaattgaggccgctaacattgtttttttttaaaacatttttgggctctttatggtcgcttgacattccatataatttgttggttcctttttctatttcaaaaacattgctaatttaaaagggattgcattgaatctgtaactcgctttaggcatcatgagcattcttcataatatcaagtcttacaacccttaaacatgagcatgctcaaaagtgagttgtttaatttccatatatatgttgctatttttgttttcttctgttattcatttctagttttattccattttgatcagaaataatagtcactgaaaggctaaaccactctgggaagtgacccccattatagaacattacaaagagatgtgagggcaccacttctgccctgatgggctagagggatgtgttctctgagatgacacgttgcagacaaatgcagggaacaatataacccccttttcatgtaaactcttccttatttttctagagtattagtgatagtggtggctttgaagtcttggggaaggtctggcagtgccgtgaacctgcctgctacaggtgataccaggggggaaaaattaaaaccatacaaactgtagaaacatgaataaatacagcctagtgtaaagtaaaaacaacacaaaggccttctctgatatttctacaagaatgtaaaaagggactttacacttaaccaagctgcctttgggactagttaaggctagatttttgggaggcacatctttgggtcactcatggaaatcccctaagagagagcccagagaaattccatatttgggtctggatcctgggcccatcctggttttgtcagacccctgtctgtagagacccccatgtgcctgctctcaccgtaactcactgtatgccatgcttgggggtgtggtgaacctgccagttgtccaaggagatgggggacttgaacccatcaaatatctgctcaatgattttaatgaaactctacagagagtgttcccagcagtgaagcaggaaaaaaaaaaaaagaaaaaagaaaaaaaattaattatctcctttgtttttaccaccaggtgacatctccattagaaattctgtttcctagatcaggaacataggagtatctgcatagacccccagccaatgaggaaacccgaggacagcttaaggccttgggattcacatctgagtagacacacttggtccacaatgctcaactttttattccaccagccatgacctgggtatgaacatgacatagccgccagggttccaatgccttacagcctgcccctgtgagaaagagccccctcctttcctgctccccctgcaacacatggtaatggtagacagggtcgggttgcccagattagatgacacgggtggcctggcatggacggacctgacctgggcttcactgtgttacctctgtttgcctcttgttgaatggccagtggtatcaaggatgtgggctgagccaatatgtatatggtcagaaaagtctctcactttgaacctttctcaggcaacagcttaggaatatagcacacaatgagaacacagtactctctcaagcatctcccatgaaattagctagatagagggctctctctagaatgtgggtttctgtttcccaaagttctaaattctgttaggttctgtcacaagggaagtctgttaacttcttcaaggttttatcccctgagcccttttcctccataaatctatgcaaagtccctactgggctgctgattgctcaccctcatctcccatgtcaactcttttcctgtaaacagttatgcaaacacaattatgcctcttactccccaaaaagatctaaatacagccagggccccaggtttgagagaacagagttggattaaaatcttcttttccttttcatttctgtgaccatatgaaaatgactgtgtgcttcagttctccccagccctgaagtatgcataatgggattaggctagcatcaacttccagaaagagtcattggcgatatatgagatagaatgaatcaaaatcagttggatgtagttgctcttgcctgtaatcttagcagattggtagaccaagatgggtggaacacttaaggccaggggtttgaaaccagccatggccagcatggcaaaaacccttctccactaaaaatgcaaaaattagccagatgtgttgatgcttgcctgtaatcccagccactcaggaggctgaggtgtaagaatcacctgagccaaggaagcagagattacattgagccttgatcatgcctctgcactccagcctgggtgacatagcgagactgtgtctcaaaaaaatatatatactatgtatatataatttatatttatatattatatataatatataaacttatacatatacacctttatgtataaaagatatatatttcatatatctgtatacataaaagatatatattttatatatatggccttatttttccattctacagcagaagaggttgaaatcaaaagaaaatcagatactgtattctggcattaaatattccagtgctgtgcattatatttggaatcacatgtatatgcttcatctcagcctatgtggtgggcacccccaacaaagtctcacaacaacactaagttgtgagtgactctgttatttaaaaacgcagctcaccgctcagtgcctcagaagccggtactataacaccgggtttccaacaaagacattggattccagctgaagcctctttccctgtgcttacttaaaggtagtaatattctcagaaaggtttaagaggtggcttcttgtttagcagggaattgctgaaaggaaaaatgtatggaaagtcactgggcatgaacagccatcttttcctgctacacacaggtcatgtgcaaatttggggacagttagtacaaaacatgtgatggaaatttgggctcttacatcagtgagcttatttcacacagactccagttgaccatattggttccaaccaattttagccactttttagaagtctcataagtggaataaatttcattctttcaacaagttctatcttttcttatctgtcattctgcaaactgaagaatttctgctagtcgttggttgaactctttggggacctggttctagtttctgtcaaagagaatacaacaaatgtgataggttatcacttctgacttagttcaggcttctataccaaaaaacatagactaggcaacttataaacaaaagactttagttctggaggctagaaatttgagattggcttccagcatggttgtggtctggtaaggactctcttctgagtttcgaactccagacttcaggttgtattctcatttagcagagagaaggacagacagccttctgcggtttcttttacaaagccagtaatctctaccacgagggcctcatgcttaggacttaattacctctgacctgctaaggccattaaactggggattaatgttctggaatgtgaatatggtggggaatcacatagtctactgcaacttccaaagttatatttccaaaacagctattattttcctcccacttgctctgtcctgtgtttcgtctctcaatctctctgtctccctttctctttttctgtgcatatgtctgtctatctctttcattttccatctctctattgtattcttcaagatgaggaagcgatctccagtgtcctaagatgctctaggcacagacccacatgatagagaactgaggaactgcccaggccaatcaacaggaagaaactggtgttctcagttcacactgaatcctgccaatttccatgaggcagattggaggctgatctctccccaaatccagcttcagttgaaatcacagccccagcctcataggggaccttgaggcagaggcacccaactaagctatatcgagattctgattcacaaaaattgtgagatagtatttgttgtcaaaatgtgctaaaattcagggcaatgttgtcagagagcggcaaatgactaatctcctctttcaggccccaggatacaccctcccctcttttcctttctttctcaggctgcctacagccacacttgtccctttataacctcctctgctaaactgacttgtgcctctgagtcttttcacaaagagtggcttttccctgacacactttccacacctgcgcagttgtcattctcgtcacaacataatgtcacctcagggaggcattcatgtctcctccaggcaacctctccccagccctccctcccaacattctactttatttccattataaaatgctcttttctttcgcatgtacttgctttagtgtttttgtcctgccgtcctcagactgtaggctccccgcggggatgcagggataacataatcgtttttggtaccacatggtgaacctaccaaggtagctgccacagggtgagtgctaggggaagagtcgctgagtaaaataacatggaaaatcacaaagtccttcctgctttcggtcacccaataatgtggagatcaagaatgataacaggagctgcaggccctcagcctgtctctcccacggctccagctactccagtcaagtccagcgggcacaagaaacacggggtctgcagccacctagagacctccgctagcactgtagtcccaggcagaagcatcacaaaacaggtacctgcactggggaattctcaaggcagtggctcttcagggacccctgggaaaaggagcagtatctgaaggctccaagggccataaaagtgacctcggaagcctcccttgattcctattttcctcagcctctttgagtgtgctgtgcactcattaaacattttaacagcattcggcgacattattttcttccacttccgaatgaggacctcaaggacagcccaaaaaactagtattttttctgggccccacactccagagcccagtgcattgtcacattgtgctttattccaagtcctcatccgcccaagtctctaggcctctctcttctctgaaggacctctagaaactgaaaagcctcttcccagagtctcaaagcacagtgatttaccaatgaaaagccaagggcggcagacacctatgagtatctagaatccttggtattattccttctcagtacccctatttatgagggagaaaacaaaggctttctttcccgtagcctgtctttatatcacacggggtggtgggtggagggcatagctcattttagttccaggtgcccacagaagtgggagtcacaaccccagtcctgtcctcttgaaacagctgggaaagtccccaggcttggaagaacccagggaacctggaggatccttcatcgcatgctgtcagctcctggtcatgtagctgggggagtggatgcctctgcctcatggcaaagctgcatctactgtttcttccccttttgtcacttctttggtttcctcttccctaacctcactttagaatctccactttagatctccaatttagaagcctgtgtgtgtgtgtgtgtgtgtgtgatgtgtttgtgtgtgcatgcctgcacgcctatgtgacaacattgaagagtagaaagcccaggtagaaagtagagcacagggttttccaggactcatgggctctcatttccaaagcaaacctgatgggtggggtgcatgcaaggcctaggaagctggatccctccctaatactctgtgctttgcccaatttgtgggatctggaccagtctttgcctttttgggaggtctcagtcttcctgttgtaaaataaagagttggctacaaaactgtatgagcacatgctcagtgaagacagggtgtcatgctcaataccacagagaatattgggatggggaaagtttgggcagacttaggtgtccatgcgtgctcaggcctctgaacagggccagtgcaggcaaacataaagcacagcacagccaggttttctttccagggctacaggatgaaacagtgcaccacaggatctgctcttgaggtcggtcccgcaagattttcccaccttcaaccagcaactgtttgatgaatttcatgtcctgtgaagcccatatccacccccattacagtgaggggcacagggcactagacctgtaaaataatgtcttttgcctttttttcttttcttttctttttcttttttttttttttaactgagtggatgtttcttctttctctttatctgttttgtttgttttttaactaatttttaagaggtctttacaggtcagctgtggtgcctcgcacctgtaatttcaacactttgggaggatgaggcaggtggattatttgaggtcaggagttcaaaaccagcctggcgaacctggtgaaaatccgtctctactaaacttacaaaaaaattagcggggaatggtggcccaagcctgtagccccagctactcaggaggctgagacagaagaattgctgaaacttgggaggcggaggttgcagtgagccgagattgcacgactgcactccagactgggtgacagagtgagtctctgtaaaaaaaaaaaaaaaaagagagagagagagggagagagagagtgctcttcatggaaacatgagcccctttgtaatttcatgtgttgaaaatatttattccaattttgcaatttcttttcttattgtggtgttctctttaagtttggtttagatgttattagtgtttctccccaaattgatttattgatttccattttcacaatacaatattttggcagaaatcttgtggaaactgtctaatcagtttaaaaatttaaatacatattaaaaaatcaaagaactgtaaaaactgtcctgaagaatgacaaagtttgtgagcttacaatgccatatattcagacttagattaaagctatagtaataaaagctatctatggtagtaatgcaaaaataggcacaaagaaaactagaaaaactcgagagtccaactcagactcacacatttagacattttgtatattacaaaacaggcacagaagagcagtggagagaagacagcatctcggtaattagccttgggtcatctggttatttatgtgagaaagaaataaacctatcttatattgttaacaaatttcgagacaagtggattttaaattttaaggtgaaaattgaaaacaatatttctagtagataacatagataagtatgtccatgactttggcacaggccaagatttcttgggacacaaaatgcataaattatcaagacaaaaatatgacaaattggactttattagaattaaaaccttctcttcataaaaaaaaaagcttcaggagagctgaaaggcaagaacaaagtggaaatcaacatttgtcatatattgatctggcaaaagctttttatctagattattaagctaaatcccatcacttaataaacaaagatgcatacattgaacaaaattggcaaagatatgactaggagttccacatacagaaccgaagggccaacaagtagatgaacatatccacattcttatgcatcagaacaatgcatatgaaaactacaattgaataccactatgcaatcattaacatttttgaaaactgacaaaattaagtattagtgatgatgtcaagcaactggaactttcttataccattctgtgtgcaaactgttataaccacattcaaaaccacttgagtagtaactccttacatacacgatgtacataagcacactctagaacccagcaactctgctactaggtatatacacccaatagaattgccagcatattttccaatgtagtaaagtgctcgaagtagcattatttggtacttttccaaactgaaaaaaactcaaatgtgcatcaataataaaataaataactaaaacagctacatattcctttataaggggacattatacagatataaaattaattggagacatattaaaatatacaaaaatctaacaaatacaatttaattagatttaaaagtcctatccagagcaatcggccaataaaaaagaaaaaggcatacaaatagaaaaagaaattgaattctctttctccatttgcaatatgagtcactacgtagagaatgctaaagcctctccaaaactacttttggggaaaacttgaaaagcctcctgaaacggataagcaagtaaagttttaggacacaaaaccaatgtacaaaaataagcagcatttctatgcatcaacaactttgaattcctgaacatcttctggttttattgcattttcaattttttccctccattaactatacattttttcttttttcagctaaactaatttattcttctgtataatttcaccttgttaataaaccccaggccaaaaagtgggaataaagtatttgtctgcatcctgtttcctcattttgaaaactagtctagacgaaacctatacttgttctagggagttggcatagacagcatttatttccgttctcagcagtgatgccagccagaaagagggagttccccattttcactttggttagacaggactctggatggttgaaggggaaaagtttcagactctaagggagccaaataggatattacaaagatttatgcatttactccgggagcaattattgtgttaaattttgtgcaaaacactgcgcaaacagcaattaaagtgaaaattattaaggcattacctttaccttgggaaactcacactagtcagattctccgaaccccagaacataacaacaacctagtaaaatcttgttcagagtgaagagagggtgggagcaggaaggtaaggttaaaaattaggctgggtgaatgagataattacccctagtcaagcagtggaagtatggatggctttgggatgggtgaagacaaaagaatctcagcagagggtgcagataaaaaaaggcagaaacacaggaggcttatgcaggaagaggaatgagtttgctggactggggagagtgacagtaaaaagcagaggataataggcatctctggtcatctagggactatagggtggattagttgggggttacagaatcagtgaggtactttttaacagtaggatgggtaaataagagctataatttggaataattatgtagcaatggtggttaggagcaatagaaactcaaagtattacataaatatgtttttttcttattctcccacacaagcctttcaccttccctcttaaactgagaacggagtggtttgctatgatgtttttaaattctcacaggcaagcattactctgtgctgccttttaataaaggctaattttaaccaaattaaagaagattgaatggattttcttgatcataatggttgagtacaacatctcttaccttctactagttttcagtataactgaagtaacagaatgtcaatactccatggaggggtgttcctcttgctaaggctccctcctctgggctaggccttctacaccatggctgtcctgctgtggctggagctggaatttggattgacctctgtgtgtcttcctagcacacaataggtgtccaattagcatgggcagaatcaagctcctccctctcaccatttatttctccatttgtcccttgttgggaatggagagtcctgccactgagttcagcccagggttgaagttcaaatctcagctgatacttggtggatgttgacttttttgagaagaacttgggagaataaaacattataaaggcgctggccaggcacggtgtctcatgcctgtattcctggcatattgattggctgaggagatagaattgcttgaggccaggaatttgataccagccttgtcaacatagtgagaccccatttatacaaaaaacttgaagcattaaaaacatttagcctggtgtgatagttccaaactgttgtctcagctatgctggacattgaggcagaggatcacttgagccaggagttctaggctacagggagctatgatcgtgctgctgcactccaaccagggcaactatgcaagatgtttcaaaaataaaatcttttattattcttcacccctatagtctctccagaacttgtgcactatgtagcagaaagaatcaaactccccaagagtttggttcttgcttatgatttggttttctgctgcttggctgccccctcatttccccattttgtataaataagaacccccaggtgaagtggagtttctccccagcagagggtctcaccaaggccccaggactggcactttaggtggaggcttgcctttcaacctctgaataataattgatactaaaattgagaagttttccagacaccagcttcctgaaaggagcacccagtcgagacaagatgaggtcagtagcgaaggtgacccaggctgagtgggccgtacattcctctacttttcccaaacttccctctgacatcctacaaactttctgtcttcccaggactttcttgccagggagtctaatgaagtaaaagctttaaaattgctttgattttaaaaataattttattggttcttaaaatgtactgttaaatattactgtttttcttcccccaggggctacgtgaacataagctcggttttcacactagcagcatttagaaatgtctcttctggaggaacactgatgctctcaatcacacgtggtaattctctcctccaggcacaaaatgcagtctcagcatctctgtatcaggagtcactgtctaagtctctccagagaaataagctacccaggccatccagctgctggtgagttgctttgtggtcatgaactgggtagatttcctcatctcatgctcattggccacattcaggattaatgattcaatgcttttgttgttccagaagctgtggtcagtggctatgcaggagtcagtctttcagtgctgatctttgctgagaaaataatagtattgttcaaacagtatataggatttgcactcaatatttaataatttagtgacaaaaatctcttaaatatacattatactgatataaaataagttactcatctattatcaaatttactcttttatttaatataactcttgggataacattttcttttatgcttccataaatatgcttcacatggatatatcacatattgtgtataatttcacacagtgttaatatagtttccatctatttagatgtttgcacatttattttatctcaatgtttgttctcaggaagagtgtttttctttataaactaaattttcagcaaattttaaatgcatttcactgacgtaattatacttacattgtatttgtgtattaagttacattttgtccttaaacctgaaaataacttttcaaatatatgtaattttaaatttacatgtttttccctcagaactttgaaaaccataacctattggattcttgatcttattcacatattgagaaatatgtttcttttcattgctttataattaatttgaattttatcttagatagctttacgtgattttctctattatggtattatgcttttaactattgtttttcttttgatcagaatgcctttaagctattataattaattattttaataattatatatttttattccctatttgacattcactccattttatttattcgaacttgcacttaaacaacatgacttattttagatttttatgtattttaatttttcatattgtttatttgttttatccctattgggacttctaaatattcacttcatcatatcttctaattcataatttctttttcaattatgtaatttttctatgcattctatcctttaaatttaaaatttttacctaattattttgataatataacttattttgatcttacttttaaacttttcctctaatatatttaaacattataactacttatattatttctacagtatatatacaattttgggattttttaagatgtaatggtacagctgtgtttttcttataattttgtttcttaataactttgatcttgatgacttttactttgtatattttaaaaagaatagtagacttcattttattataaatgactgacctcaattgatggggccattgaagattctgggtcgaggtattttattccagtgaaaagttatctgtaatgttaataatgcaccctttacagacacctgaaaatgattaagtctatatatttacctaaattgtcctgagtaaaacacatagtgtacatataaaccagaaactcatatgatgattggtgttaatttccaaatcaaccaaagaggagaaataccacctccactaactaacctatttttctaaacttttgaaaatgtaaggattctagctttagatagcatagtcagatccaagtactcctgcatctatgctgctgtgacattatattcaccaatcagacacgttaaattctaacaacctgtgcttccattattagcaattcccacaggtagcatcaacttccagcctaatttttattctacagctgtgcttcttcattctttcctgaaaaattatttgtggaggtacatgcctttgaagtttctcagcatatattgttatttgaggttgaaaagataagattatctaaatttttgccagaaactctcatacccacattatatctttgaaagcattggttatcacactgctgctgacatgtgcatgtaggagaagcatgtaaatgtcagcgctttgcagtctctaaggggctgaaataaacaataccggaaatcttggccactgaggctcacatgtagattttcattcccagtccaggcatctagattcaggggcaccttcctgagggccttttggttgaggccttcttcagaaacttttgttcagatccctgtttctggagaagaaatggaactttgataataatttttatagattcctattaatattcaattctctttaatcttgctcatacattctcctctacgctctcctgcccccttttccacaaaattgcgggcctgttttttatgagggtgccacctcggcagtgagacagtgccccatatttgtgctgatccatctgaccctttcctggtgcttttccatgaggaaaaaatggaacaatgaggagtcggtgcttgatctaatgttgcctgttgtttaacacaatcacagaaaggaagacaaaaaggcataactatttctttgatgtgggcctcttgctttaatttaaaactctgatattaagcaggttagctcttcccagctcagctcagctcttgaaatttcatggaagaaattctgtttttattggtctaaattttgtgtcttttatatagaaaaaaggtaataaaattgcatcttatatttaaaaattgaatgccttctgttttgccattttactgaagagaaaatttgtgtagcctattggcattattaacagtgaagctccaagtactaatattcagaaaaaataatgaatcaaaatccaactatttctcagtaccattttcttttttataaactttctattttattgtctgtaatttaaaaacttctgtggaaaagagtttaaaattttcaaagttaatacaaaattatttttagagtttctttttgcataatgtttgtcgtaagtagctaatattaataaattgtaatcatcaattcttatctaagctgcacgttaaaaaatatgttaatatttgctgctgcctaaaatataatacatatttacataatctaatttactaaaaatagtaataaacacatataaataatcaacatacacaggtcattttttctatttcttacttatattttatgtttcatatttgtatcagcacactttatgtcctagtatcatatatggaaacgtgcctattttgcatattgttatattaaataataagacatatgcttagcttcccctaggttaaattttttacataattgttattaacgtaaataatccagaaattaaagtttttaaaaaaatttccagtgccctcactgtgcataatataattctattttttaaagtgttagtgctgtttgcattatataaaagaatattttagtgtatcaactaactacatacctgaaagcatggcttactttttcattagtatatacttttggttgtactcggctatttttctaaaagtgcttgcaaatcagttccaggccacagggctttgtcttcaacaaaataagaatatctcagagacccacagaaataactgtaccaagtactcctataaacaggcttctgatagaatgacttacataactttgaaacactatcagtggactaagttatttctctaattctagcagagaagcatatgtgcttacaagatagagtaaaacaagtatgaataaaacaggactaaatgaactgacaaagaatgataataggttttgtttggaatgtgaacataaaacattcctgctattatttccttggtatctaaacatgagctaatgggagccgttgttacatgttgtacacccttaagaaggtttacagtttttcgtctcacctatattcgtagttgtctttatttgtggtttagaatctcagctcttttcatagctgcctggcactcatcttgtatgagctcctttgtgtttctgaagcctctggcatacaccgagggtgtgggtttgcctggaatgtagcatcaacctgtagagaacaggattttccatgacccagtcattgaataaacttgatatctgcttctgctgttgagaaaacattatttctccttcaggaatatccaccctcttcatcaagaacatcgtgtcattcttcagggtcacagaatgctctacagcctacttcctggtgtccaccaaggaggagattagttgcatctgaattcaaggaagattcgagagggctcacagctgcagaattccaatcactctcagtctgactgtgctgattttagaaagacacatggggatctgccacaaggaaggcactttgcagggaggcctcaaccccatggcacaccccttcaggagggctcttctccttgtaacagtcacttagccacttgtagaaaggcaactcttagaaaatttaaatggggaccaaaatactaaccctaaccagtttattatctcaaagaattggaaaaacaaagttttcgaatactacgggattagaagagtaaacaagatatgccttttctttggagctacatatatgtattaaaaatgggatgtacaaagaattttttatcacatggagaagtgcttatgagatgatataacattaaacaaattaatgaaaggcacacattaaaaagtataaccaaacttatacattagagctcaaaatttaaaatgtgtagaaaaatgattgagaggaaatatgccgaattataggaattgatgtgtttcttataggaagcaggatcctgtgagaaattaaattgctttattgattctcttgtaattttatagtttccaaaagttctacagagagtgtaatgtaggaccttagtcaggaataaacatctctttaaataagcagcagagaatttcaaaggaagtgtgtggtatgggtttatgtgtttctttcaagatctaatattttccacgtagtgcttcagaaaagataaggtaatttcaacaacttaaccccatcatcaagagggtgttacttaagtacattatgggaggtcatagataaacaaccagtcagcctctaagcatcagaaaatctgtgatgtccattggcctgtgagatggtctgcatttctttgaaggaaaaaagcaggttttaaaacactagaaccgaatcaaatccaaatttgaatagaaagattagaaaggcttatgcatgggaaaaagattcagggtattcaacggttaattctgactatttctgagtaatttaaatttacctataatttaaaaaaaaaattaaggtcaggtgtgttgactcaaacctgtaatcccagcattttgggaggccgaggtgggtgaatcacttgagaccaggagtttgcgaccagtatgggcaccatggcaaaacctcatatctactaaaaacacaaaaaatagccaattggtggtgtgtgcttgtagtcccagctacttgggaggctgacgcatgagaatcgcttgaacctagggggtggaggttgcaataacccaagatctcaccactgcactccagtctgggtgacagagcaagaccttgtttcaaaaaaaattttttttgtattttaattaggaatcaaataagataattaaatgtaaacttacacttaatttactttttaagcattttaagaattggtattctaattttgtgtcggtacattttaagaatcaataaaattatttttaaaatcaaagcaattttaaagcttttacttcattagactccctggcaagaaagccctgggaagatagaaagtttggaggatgtcagagggaagtttgggaaaagtagaggaatatatggagggcagaaggagtgaacattagggaaaccctcccctagctcagtcttcagatacgctggtggacttccccactcagcctgagtcaccttcgctactgacctcatcttgtcttctgactggatgctcctttcaggaagctggtgtctggaaaacttctcaattttagtatcaattattattcagaggctgaaaggcaagcctccacctaaagtgccagtcttggggccttggtgagaccctctgctggggagaaactccacttcactggggggttcttattttatacaaaatggggacatgacggggcagccaagcagcagaaaaccaaatcatgagcaagaaccaaactcttggggagtttgattctttctgctacatagtgcacaagttctggagagactataggggtgaagaataataaaagattttatttttgaatcatcttgcgtggttgcctgtttggagtgcagtagcgtgatcatagttcaccgcagcctagaactcctggctcaagtgatcctctgcctcaatatccagcatagctgagacaacagtttggaactatcacacctggctaaatgtttttaatgcttcaagttttttgtataaatggggtctcactatgttgacaaggctggtatcaaattcctggcctcaagcaattctatctcctcagccaatcaatatgccaggaatacaggcatgagacaccgtgcctggccagcgcctttataatgttttattctcccaagttcttctcaaaaaagtcaacatccaccaagtatcagctgagatttgaacttcaaccctgggctgaactcagtggcaggactctccattcccaacaagggacaaatggagaaataaatggtgagagggaggagcttgattctgcccatgctaattggacacctattgtgtgctaggaagacacacagaggtcaatccaaattccagctccagccacagcaggacagccatggtgtagaaggcctagcccagaggagggagccttagcaagcggaacacccctccatggagtattgacactctgttatttcagttatactgaaaactagtagaaggtatgagatattgcactcaacccttatgagcaagaaaatccattcaatcttctttaatttggttaaaactaacctttactaaaaggcagcaaacaataatgcttgtctgtgagaatttaaaaacatcatagcaaaccactccgttctcagtttaagaggaaaggcaaaacgcttgtgtgggagaataagaaaaaaaatatttatgtaatactttgagtttctattgctcctaaccaccattgctacataattattccaaattatagctcttatttacccatcctactgttaaaaagtacctcactgattctgtaacccccaactaatccaccctatagtccctagatgaccagagatgcctattatcctctgctttttactgtcactctccccagtccagcaaactcattcctcttcctgcataagcctcctgtgtttctgcctttttttatctgcaccctctgctgagattcttttgtcttcacccatcccaaagccatccatacttccactgcttgactaggggtaattatctcattcacccagcctaatttttaatcttaccttcctgctcccaccctctcttcactctgaacaagattttactaggttgttgttatgttctggggttcggagaatctgactagtgtgagtttcccaaggtaaaggtaatgccttaataattttcactttaattgctctttgcgcagtgttttgcacaaaatttaacacaataattgctcccagagtaaatgtataaatctttgcaatgtctgatttgactcccttagagtttggatcttttcccctacaaccatccagagtcctgtctaaccaaagtgaaaatgcggaactccctctttctggttggcatcactgctgagaacggaaataaatgctgtctatgccaactccctagaacaagtataggtttcatctagactagttttcaaaatgaggaaacaggatgcagacaaatactttattcccactttttggcctggggtttattaacaaggtgaaattatacagaagaataaattagtttagctgaaaaaagaaaaaatgtatagttaatggagggaaaaaattgaaaatgcaataaaaccagaagatgttcaggaattcaaagttgttgatgcatagaaatactactggtttttgtacattggttttgtgtcctaaaactttacttgcttatccatttcaggaggcttttcaagttttctccaaaaggagttttggaaagactttagcattgtctacgtagtgactcataatgcaaatggagaaagagaattcattttttttttctatttgtatgcctttttcttttctattggctgattgctgtggataggacttttaaatctaattaaattgtatttgttagatttttgtatattttaatatgtctccaattaattttatatctgtataatgtccccttataaaggaatatgtagctgttttatttagttattttattactgatgcacatttgagtttttttcagtttggaaaagtaccaaataatgctgcttagagcatttgtctgcattggaaaatatgctggcatttctattgggtgtatatacctagtagcagagttgctgggtcctagagtgtgcttatgtacatcgtgtatgtaaggagttactactcaagaggttttgaatgccgttataacagtttgcacacagaatggtataagaaagttccagttgcttgacatcatcactagtacttaattttgtcagttttcaaaaatgtgaatgattgcatagtggcattcaattgtagttttcatatgcattgttctgatgcataaggatgtggatatgttcatctacttgttggcccttcggttctgtatgtggaactcctagtcacatgtttgtcaattttgttcaatgtattgcatctttgtttattaattgatgggatttagttaaataaactagataaaaggcttttgccacatcaatatatgacaaatgttgatttccactttgttcttgcctttcagctctcctgaaggttttttttatgaagagaaggttttaattgtaataaagtccaatttgtcatatttttgtcttgagaattaatgcattttgtgtcccaagaaatctgggcctgtgccagtcatggacatatttatctatgttatctactagaaatattgctttcagctttgaccttaaaatttaaaatccacttttcattggaatttgttaataatataagataggagtgttttttctcacataaataactggttgactcaaggctatttaccgagaagactgtcttcactcctcttctgtgcctgttttgtaatatacaaaatgtccaaatgtgtgagtctgagttggactctcgagtttttctagttttctttgtgcctatttttgcattactaccatagatagcttttattactatagctttaatctaagtctgaatatatgtcattttaagctcacaaactttgttattcttcaggacagtttttacatttcttcgattttttatatgtatttaaattttttaaactgattagacagtttccacaagatttctgccaaaatattgtattgtgaaaatggaaatctatgaatcaatttagggagaagttacatagaaacaaagcaaaacaaaacactaataacatccaaaacaaacttaaagagaacaccacaataagaaaagaaattcccaaattggaataaatatttacaactcatgaaattacaaatgggctcgcatttccataaagggcactctctctctccctctctctctctcttttttttttttccacagagactcactctgtcaccctgtcttgagtgcagacgtgcaatctcggctcactgcaacctctgcctcccaagtttcagcaattcttctgtctcagcctcctgagtagctggggctacaggcttgtgccaccattcccggctaattttttgtaattttagtagagacggggtttcaccaggttggccaggctggtttttaactcctgacctcaaatgatccgcccgcctcagcctctcaagtgttgaaattacagatgtgaggcaccacagctgacctgtaaagacctcttaaaaattagttaaaaaacaaacaaaacagaaaaagagaaagaagaaacagccactcagttaaaagaaaaagataaagaaaaagaaaaagaaaagaaaagaaaaaaaggcaaaagacattattttacaggtctagtgccctgtgcccctcactgtaatgggggtggatatgggcttcacaggacatgaaattcatcaaacagttgctggttgaaggagggaaaatcttgcgggaccagcctccagaacagagcctgtggtgcactgtttcatcccgtagccctggtaagaaaacctggctgtgccgtgctttatgttcacctgcatttgccctgttcagaggcctgagctaccgtggacacaaaagtctgctcaaactctccccatcccaatattctatctggtattgagcatgacaccctgtcttcactgagcatgtgtttatgcagttttgtgaccacctatccattttacaacaggaagactgaggcccccaaaaaaggcaaagactggtccatatcccagaaattgggaagagcacagagtattagggagggatccagcttccaaggccttgcatgcaccccacccatcaggtttgctttggaaatgagtgctcttaagtcctggaaaaccctgtggtctactttctacctgggctttctacccttccttattctcacataggtgtgcagccatgaacacacaaacacaccacacacacacacacacacacacaggcttctaaggtggagatcatggaggtgaggttagagaagaggaaaccagagaagtgacaaaacgggaagaaatagaagaggcagctttgccatgaggcagaggcatccactcccccagctacatgaccaggagctgacagcatgtgatgaaggatcctccaggttccctgggttcttccaggcctggggatcttcccagctgtttcaagaggacaggacaggggttgtgactcccacctctatgggcacctggaactaaaatgagctatgccctcccccaaccaccccatgtgatataaagtgaggctacgggaaagaaaaccttcgttttctctctcataaataggggtactcaaaaggaataataccaagaattctagatactcataagtgtctgctccccttggctcttcattggtaactcactgtgctttgagactctgggaagaggcttttcaggttctagaggtccttcagagaagagagaggcctagagatgtgggcagatgaggacttggaataaagcagaatgtgacaatgcactgggctctggagtgtggggcccagaaaaaatactagatttttgggctgtccttgaggtcctcattcagaagtggaagaaaataatgtctctgaatgctgttaaagtgtttaatgagtgcacagcacactcaaagaggctgaggaaaataggaatcaagggaggtttccgaggttacttttatggcccttggagtcttcagatactgctccttttcccaggggtccttgaatagccactgccttgagaattccccaatgcaggtgcctgttttgtgatgcttccacctgggacttcagggctagtggaggcctctaggtggcggcagaccccgtgtttcttatgcccgctgggctttactggagcagctggagccgggggagagacaggctgaggtcctgcagctcctgttatcattcatgatctccacattattgggtggccaaaagtgggaagaagggctttgtgattttccatgttattttactcagcgactcttcccctagcactcaccatgtggcagctaccttggtaggttcaccttatggtaccaaaaatgattatgttatccctgcctccccgcggggagcccacagtctgaggacggcaggacaaaaacactaaagcaagtacatgtgaaagaaaagagcattttataatggaaataaagtagaatgttgggagggagggctggggagaggttgcctggaggggacatgaatgcctccctgaggtgacattatgttgtgaccagaatgacaacagagagccagtcctgcgcaggtgtgcaaagtgtgtcagggaaaagccactctttgtgaagagactcacaggcacaggtgagttcagcagaggaggttataacgggacaattgtggcggcaggcagcctgagaaagaaaggaaaagaggggagggaggatcctggggactgaaagaggagattagtcatttgcccctctctgacaaaatttccctgaattttagcacatgttgacaacaaatactatctcacaacttttgtgaaccagaatctcgatatagcttagttgggtgcctctgcctcaaggtctcttacgaggctggggctgtgatttcaactgaagctggatttgaggagagatcagccttctatctgcctcatggaaactggcacgattcagtgtgaactgagagcccgagttccttcctctcgattggcctgggcatctcctcagttctctatcatgtgggtctgtgcctagagcatcttaggacactgcagatcacttcctcatcttgaggattacaatacagagatgaaaaatgaaagagatagacagacatatgcagagaaaaagagagaaagggagacagagagattgagagaggacacacaggacagagcaagtaagaggaaaataatagctgttttagaaatataactttggaagttgcagaagactatgtgattccccaccatgttcacataccagaaccttaatccccagtgtaatggccttagcaggtcagaggtaattaagtccgaagcatgaggacctcatgatagcgattacgggctttgtaaaagaaaccgcagaaggctgtctctccctctctctgctaaatgagaaaacaacctgaagtctggagtttgaaactcagaagagagtccttaccagaccccaaccatgctggaagcccaatctcaaatttctggcctctagaactaatgttttttatttataagttgcctagtctatgttttttggtatagaagtctgaactaagtcagaagtgataacctatcacatttgttgttttccctttgacagaaactagaaccaggtccccaaagagttcatccaatgactaacagaaattcttcagtttgcagaatgacagataagaaaagatacaacttgttgaaagaatgaaatttattccacttatgagacttctaaaaagtggctaaaattggtcggaaccaatatggtcaactggagtctgtgtgaaataagctcactgatgtcagagcccaaatttccatcacatgttttgtactaactgtccccaaatttgcacatgtgatctgtgtgtagcaagaaaaaatagttgttcatgcccagtgattttccatacatttttcctttaagcaattccgtactaatccagaacctacctcctaaacctttctgagaatattactacctttaagtaagcacagggaaacagacttgagctggaatcccatctctctgttagaaacccggtgttatagtacctgcttctgaggcactgagaggtgagctgcgttttaaaataacagagtcactcacaacttagtgttgttgtgagactttgttgggggtgcccaccacataggctgagatgaggcatatacatatgattctaaatataatgcacagcactggaatatttaatgccagaagacagtatctgattttcttttaatttcaacctcttctgctgtggaatggaaaattaaggccatatatataaaatatatatcttttatgtataaagatacataaactatgtatcttttatatataaagatatatatgtataagtttatatattatatatagttatatataattgatatatatatagttatatataatatataaataaaaatatttatatacattatatatatatatattttttgagacacagtctcgctctgtcacccaggctggagtgcagtggcaggatcatggctcaatgtaatctctgcttcctgggctcaagtgattcttacacctcagcctcctgagtggctgggattacaggcatgcatcaacacatctggctaatttttggatttttcgtagagaagggtttttgccatgctggccatggctggtttcaaacccctggccttaagtgttccagctgccttggtctaccaatctgctaagattacagcaagagccactgcatccaaccgattttgattcattctatctcatatatcaccaaagactgtttttggaagttgatgttagcataatcccattatgcatacttcagggctggggagacctgaagcacacagtcattttcatatggtcacagaaatgaaaaggaaaagaagattttaacccaactctgttctctcaaacctggggccctggctgcatttagaactttttgggaattaagggacataattgtgtttgcataactgtttacaggtaaagagttgacatgggagaggagggtgagcaatcagcagcccagcagggactttgcgtagatttatggaggaaaagggctcaggggataaaaccttgaagaagttaacagacttcccttgtgacaaaacctaacagaatttagaactttgggaaccagaaacccacattctagagacagccctgtatctagctaacttcttgggagatgcttgagagggcactgtgttctcattgtgttatattcccaagctgttgcctgagaaaggctcaaagtgagagccttttctgacagtatacatactggctcagcctacatccttgataccactggccattcgacaagaggcacccacaggtaacacagtttagcccagggcaggtccgtccatgccaggccacctgtgtcatctaatctgggcaacccgaccctgcctaccattaccctgtgttgcaaggggagcaggaaaggagggggcttttcctcacaggggcaggttttaagacacaggaaccctggtgggtctgtcatgttcatacccaggtcacggttggtggaataaaaagttgtgagttgcggaccaagtacgtctactcagatgtgaatcccaaggccttaagctgtcctcgggtttcctcattggctgggggtctatgcagatactcctatgttcctgatctaggaaacagaatttctaatgcagatgtcacctggtggtaaaaacaaagaagacaattaacttttttcgctgctgggaacactctttgtagagctgcattaaaatcagtgagcagatatttgatgggttcaagtcccccatctccttggacaactggcaggttcaccacaccccccaagcatggcatacaatgagttatgttgagagcaggcacatggggttctctacagagagggacctgacaaaaccaggatgggtccaggatccagacccaaatatggaatttctctgcgctttctcctaggggatttccatgagtgaccctcagatctaccccccaaaaatctagccttaactggtcccagtggcaacttggttaagtgtaaagtccctttttacattcttgtagaaatatcagagaaggcctttgtgttgtttttactttacactaggctgcatttattcatgttactacagtttgtatagttttaattattcccctctgatatcatctgtagcaagcaggttcatggtactgccagactttctccaagacttgaaagccaccactatcactaatactctacaaaaatagggaagagtttacatgaaaaaggggttatattgtttcctacatttgtctgcaatgtgtcatctaagagaactcatcccagtagcccatcagggcagaagtggtgccctcacatctctttgtaatgttctataatgggggtcacttcccagagtggtttagcctttcaatggctattatttctgatcaaaatggaataaaactagaaatgaataacagaagaaaacaaaaatagcaacatatatatggaaattaaacaactcacttttgagcatgctcatgtttaagggttgtaagacttaatattatgaataatgcttatgatgtctaaagcgagttacagattcaatgcaatcccttttaaattaagaactttttttttgaaatagaaaaaggaaccaacaaattatatggaatctcaagcgaccataaagagccccaaaatgtttaaaaaaaacaatgttagtgacctcaccttttctgatttcaaagcacattacaaagcaacagcaatgaaaacagtttgtttctggcataaacacagacaatttttccaataaaacagaaggtagcacacatgtaaacctcacacatatgagcaaatagctatttgcataccaatattcattgcagcattattcagaaatgccaataggtgaaagcaacacaaattttcctcatagaatgaataaataaataaaatttgtaatataaaactaatggaatattacttagcttttaaaggcagaaaatcttgtaccatccacaataaagaggaatcttgagaacataatgctaagtaaaattagtcacaataaaacagatactctatgattctacttatatgtaatatctaaagtattgaaacttagaaccagaaaatagaatgatttttatcaggagccaggtggtaaggacaatgggtagttgtcatttcatgtgtactgagttttagttttgcaaaagaaaaaattttacaaatatgttgcttaacaatgtaaatacacttaacatgactgaactgtataagaaaaaatattaaagattctaaattttatgttatgtatttttaccacaatcgaaattaaaaatgacacccaagggccaagagtgatcactcatgcctgtaatcgcagcactctgggaggctgaggcatgcaggttacttgaggccataagttcaagaccagcctggccaacatggtgaaaccccagcttcatgaaaaatacaaaaattagccaggcgcggtggtgcagaactttaatgccagctactcaagaggcagcagctggagaattgctttaacctgggaggtggaggttgcagtgatccaagattgtgccactgcactttggcaacagggtgagagtctgtcaaaagaaaaaaaaaaaaaaaaaaagacacccgaagggagagagttacaaagtttctgaaaaattatcttcaaatcacataaatctttccttcacactaagataatataaacaatagatgttgaaattaagacaatttccatgattactcacttagacagaataaattattggccatcaaataagaagaaaatataaaagtcataaacaaaataggggcaatatttatacaggcaaacaaacagttaaatcattgtattaacaaaagacatagggatggttcatatttgacttctgccccacactgtcttaatgcatacagagttgaatattgttatacaatattatattatacaaattaaaacttaaaacaataaactaatataaggtgccctaccctaaaacatgaaacacagaaatgtaaaattgcaaaacaaagttaaaataaacattaacccccaaattcttatttgaataatgaaattcaaaatcataataaataggtagaaagtaaaaacacaattaactgatgtgagacagcctactctaaaaaatacagaaacataaaattataaaacataattaagagaaactttaatccataaaatcctgaataaacatagtgtccaaatgaaaaagaatcccaggtaactacaatttttaactcttcctgtgaatctatgaaaagtatgaattttgaattatttggatacagttagggcaacaacatttcagagaaaacacattataattaatacaaagagctgtgatgagaaagttttaaggaataagcatttaagtaatactagagaaagttttaaattatgctactgatgcattgctgcttttcttacacaaaacgataaggctgtaatctagcttttaattgaaaagtcttacatttctaaatatggtaacaatataaatattgtaaatacagtataaaacattgacatataaaataaaaattggaaataaattgtactattagtcaaataaaagttgggaaaactggaagaagatgctaatagtaacattgtgcctagagtcaattaaacatacaagccaaatattttaataaattataaattatataatttatacataatatatacatttgagcatgctattttacaacttctgaaaggaaattacagacaaatgtgacacatgataattcagaaagtgaaaacacagtcatagtaatcttcatattaaagaagacagaatcataaaatactaagtgagaaataaagtaataattgtgaattcaatatatgttgaacaatattctaatttcccttacggaaaaagtttttgtaagaaatcagtaaaatgagtacatacaataaaccatcctacagtagaggctgttggcatatagagtttacatttctatgattaggtcctactaagaaaaaggaaattttaaaataaaatacttagattttcctatttaataagataatttttgcctataaagtttttcagtctaattttcttgtagaattaggttttagccatcgtaaaacttgacattatgaagcagaaaacaggtgtcatctgtctctggtgttcctggaatttctaacccaaatgccaattcctccacaactcccttcacacacttctgaattgaagcacaacagatttattaaaattggcataacagcggtctccagaaatgtgcagagattttcccagatccccaaaatcaatgacaaactattcagatcatttaggttctcacaagattctgggaggactttggctttcagtgtgaacgcactggaagattctaagagagagggagagagagagaatgtgtgtgtgttgaaatcagaaccccaccttatgtgtttattgtggaaattgaaaatgaaagcctaaagttgaaaattaaaatcacacatgatagcacgttgcaaactgttttctgtgctagatgggtcgttctagggtgtaggaccctggaaacaccgttttcccctccttccggaaagagctactcacactgctcaaagcctgcatccacatgtaccatgtcgaagaccagctcaagagcctggacccatatgccaccttcagcagggttgactgcagcttcttgttcttcctgagcatcttctccaatggtgacctgagagttgcgggaggcattggggccaggattgaacagaggaaaaaggagcacggaggccaggtgctgaggaccaggccatctcacctggagagttctggccctgagacatccagaccagcatgatgtttaggtgcagacagctggccctgggtggccctgtgctgatcaccggcctcagcccctcaaacagtgggaaatggaagaatggcttggaaatgggccctgtcgacagtgtgtcacctgagcacattctcccaggggcccaagaggggccatcgtgtctctagaaccagaactggaaggtgaaactgccagggggaacaaggaagagggtcctcagttgggtggagggtctcacagcaagacgcctggcttaatcaagcttggccattcctgaagcacgttcagtgactaaaagtgcctaccatgagcagctggaacacactctctgagagctgcaagatgcatggggacctcaagtacctgtttgtaattacagccaaggaccagcaggcagcattgctgcatccacatgggcttttgctggaaccagtaagtctctgccagcccctcccaggctcctgggatgccacttgttctgggtctgtggacagataaccaggacacttactcagtgaagcccatcgctcaaccccagccccaccataccctgtctcctatgccattcctcatcccagaaggaaaggcaatgcctttgtcccacagcccctgccttgtgtcatctcatgtgggggtatggaatgaacccgtcagcctaaactccagtccttctgcctgaggaatctgtccccgctgtcttagtcgccctctagggagctgtcagtgggataaagagcagccctggaagagaggcccaccttcttctgtttgacttcaggacagcctttcagggcaagaacccagagcagatggaggcctcacagaaggctgtggcagggctctcggcttggtgggctaagcatctccctctctgatgactgccatggggcccacaaccactcattcaagagggtcaccaccacattgcaggtgttcagctggacggttccccaggcagagcctgccatggactgcatacacacagaggatgcacaccttgaagttggacaatgaggagaacattcctgaagaggtgcatgcagcctggccctgccctcactgggaacccccttccatctgggtactagacagaattctgtgcacttttctggaggctccatgctggtctgttcatttggaagtttgatgctgtccgtgaggaagtaacaaaagagatatctcagagcaggttgtggggcacaggctgagagattttctccctccctagtccctctgcagacacggggctggaacaagaacctgtggataatgagggaacttctcttcgagaaccggcctgagcagctgcttcaagaaagagccacattaaagtgcctatagcccctgatgagggaatggtagcctcaggcccgcctgccatgtgtgagcaggttttcttgctatcaggatgaaagcaaagaaagctggaatgagcccagccctctcaggcaccttgaagactgttggggttccttccagcccttctagccttatgctttttggcaggccactcaggcacctttttccagcctctgagacttccatgctctggaaggagagggtcccacttttcactaggctatggggccaggcccatccagctcccggcttccactaacaaccatggggctctcacctgggcacacactgcccaaacatggaccttctaaggcagaagatcatgtgtcttgcagttccagctttctagggcttaaaagttatcagtgctgttattaagatagggaagtgagaaaggaaaacttgctgtaaaagtttcccataatcttaccacggagatcatcagcacagatgacagcacaggtagggctgctggggaggctgaaggagagtgtccagcctgttctgccagctggtccttgccaggggtgtctcgtgacccagtcccttagagaagcatgcagatatctcagcaagtatctggaaggtgcagatcagggcaacccagcactactgatggtggagtgggcctacctcccatcaagctgtgtctccacagctgacccttgtaaccaggaggtgttttacaacatgtgcaaggcagtgagctccatcagctgtgtggcattcaacactcacttcaactcggacatctcaccagaaagcagtggggactggccaatgcagaagcctgcaaagtggaacagagcgtcatggggtgggggatgtggggcctgcctgctcatctgagcactgctccctgagggtgtgatctgcaggcttcctgaaggagggctgtgagctcttctgcgaggccctgagcctgtggaacatagctgaggccaagcccatggggatttgtgtctacttgcacctccttgctcatctcagtacactacaggtgactgtgccgaggtgggccttgagcatcccctgggctgtgtcagcaaatggctctgggcctggcctggcattgagggatggcaaaaaaggagcctggggttgcattgtcatcccctatggtagcataaaatgagagagtccagacctgcaggactggaaccctaacaaaggggttaggagactgctcactttccctcaggaacccatgtggaggagctgagggaggttaaggagaccctagggactcacttgttctgtctgggcttccccctgctccatcgtttgatgaccattttctgggaagagctcaggaacctcctgtgctctagtgagacggggcctcccctcacagggtattctgagactgtgagtgagaagctaacacagtgccttgcaatactcatgggagctgtcatcctctgtgaccatcacgtggccttgtagtgttcagactgcctggcctgcctggggtttggtgaggctgttttgtggtcaggtgctttagaagctcactttctctgcaatcaaacagtgactgttttcatgtctgtttatgggtttaaaaaatcctaatatttcctttatagtagttcaccttgtatgtgtttatttgtataaattttattagagtaaagagagcttaagacaatagcattttaaggtcttaatgaggcatagactttcatgtcacaacagctaatgttgacctccttttgctgcctttgtgtaaattacacataaaaagtgcagccagaggtgactagagctgagctgcttgggcttgcttgctggcctgcagtcaggtggactctggctgtgaggcagtgcccaccctggatctacatcccccaccccctctccttagtccctgagtaaccaacaaggccgtgctaatgagagggcgagtgatgggcatcgggcacccccatattatccgggaagatttgaatgccatctgggctggagctgttgggattaggggctgaggctgtcttggcttgtcatggtgccacccacagatgtgcctgccctgtgctgcttctccagaagccggctgcccatggccctgagcctgtcacaccatgcttgctacctcatgctgcttgtgtttgaaaaacccatcccgagatgacgctgctggatgtaagtcctgaaaagggggcatcacctttgtcctgggggattaggagctgaccagattcctcttgactccctcccagaacaagtggggcaggtgctgcaattaatgttgccccctagaagatgtgtttgcactggctgagcaaatatacgatgcagagacctaaatgaagacacgtgaatggggtgtgtggacatcagttagtagctgggaaacaggtgcctctcaggcgtctcgtgttccagcaagtgtggaatatgcctgtgcccatgagtgtagacatctgaagtgtatacatttggctgctgcttttgctgccactattcccaggcccaacctggcttaaagtccaggttttaagtaaaaagtaggaggctttttgccatacagctacttgagaggctgaggtgaaagcatcactggagcctaagagattgaggctgcagtgacccatgattcagccactgcactgacacagtgagacctgcgtgtgcccttctacagagaatagctctggggcatttggggatccctacagtcccggaccctccctgtcccctgctgcctgtgctcctttccttgcctgctgtcagagcctaacatggaggcggttgccaccctgtgagcctgagggagctgtgtctgactggaacttctgtctgaggttttgcgaagtcttacttatgaatatggtctgtccagataccttgtttcaaaggaagtgagcatgagctagcaagtgtagccaccccacagctgataaacaactttgtcttgtttttaaatcatcaatcttcatttcacattggaataaagtaagtgaaacctgctacccgagcctcgcccgtgtgttctgtaacccagactcatgtggttgtgtgggctgttgtcagaaatgttataaaaaggttatgcataaattagatcaaatataaaattatgcttataatgtcacttgagtgggaggtaagagggtagagtcacaggaaatctgttggggtttacacccctgctacttaccaagctcatgagagtgtggcactggtgaccatcacctgacattggtgacagaagagaaaaggtcgaagtgaaggccaggtaggagagaggtgccaggctgtggggccaggccctgcgcatgctgggcctgttaggtcactgaacatctaactacccgggaaccagctcttttcacatcatttgaggtaagacgatgggggagcactctccagaagtcacactgcgctgggagaatggaggagagtctacataccgccatcttagggtaggttttagattgagctgaactgtcttggagagctaatgagatgggaggaagacagtcccccaggtgcacctaacagccagagcctatgaagttaggggggttgtgtgggggtggcctttccctataagaggaggagcttaaagctcttaaagctggtggctgctgctctgccatccctctacagagcagtcaagtcctcagctgcaagaatatctgaatgtcttttggagtgttagagtcctctgtgtcttagaaattttgaaaagaaaaacaaatctcaatattaatgttgattagtttctctgagccaattggggaaaataaacgtccttcacctcaaaggtttaagtgacaccgaagggtagccaccagtgtctcggccactgaagcctcatgcatgctctcactaccagtttgatttgcagccccatagttgtgttgtactaaatattctttcctctggccttgtccagtgaacacggttcacatggctaacaccacttcttgagatgcgagcaccatgcaaagctgagaacggattgggttttgtgaccattgtgcctcctcctcacctgagaggcccatttttcctggttgattcattaagtgtattggtgctgtcagtcgcctctggacaattgaaatgacaagtggctgttgattcataaagaaaatgaaggctttagatgtgaaaccctcgttttctcttgtccttctcttaggtgaaagattttatttttttcaaaaggctacatactggtatcccagcaggtgtagtgtgagaactggcatatgttaggctatggtgtcagtgtggatgggcaattcttcaagatggaaaaccaagtctcactgagttgctggagccacactgacctttctccacatcccccaccatgggctttcacttttatcctgtgcttgaatttttttcacatacaaattctttatacacacacacagacacacacacacatatctcactctgtcaatgcagtggctgaatcatgggtcactgcatcttcaaattcttaggctccagtgatgctttcaaatcagcctctcaagtagctgggactacaggcatgcaaagctacacccagacaatttttaaatatttttctagagactgagcctacttatgttgctcagactcgtcttgcactcctgggatcaaacgataatcccaccttgaccacccaaagtgtttagattacaggtgtgagctagcactctcagcaaaaatatattttaaagaaccgttacaaccaaattatgagttatcattatgccactgccctccaccctgggcaccagaacaagaccttgtatccaaaaactaagcaaaactaaacaagaacaaaaaaaaaaaaacttataaataaactttgaagattgtgtcatctgtgtccttccctgccctccaagctatcaatgttaaatataatggttattgagaaaatggttagatattattaagaaatttctatatatcttccagctgagaataggtattctgttgtggcccaaatattttctcaccgctaccttcagggtctaaactagcaaatcaggacacctgcagaggacagttggccgttttcaaatagaaagagaaatacccccgttcatgagagtaatccagtgattttcaaaaagacaagtcagactgacatgcagcgcagtcaggccacaattaccctggaataatcacttcacacagaatggttgaggagactttctaagatgagcaaatttgggcagcataatccttgcttatttattcccagcccccactgcccgcctgattcctaatggctaccctacaatgtggtcagcagtgggatgtagcgtggtgagagaggggctcagggacgggatgaaggtctttcctgcattatcaaaatgcaggttaaaaagttgttaaaaagatgtccaaatgttctaattcctactgttaaatagctgctaagatgcattatacaacagacccaggtaagggaaggagcatgtgcatttcaagtctcagctcacttcttaattagctgtgatactctgggcaggtgaccccaactatacgagcctgtgtgcctgtcaacccaaaacaatcctaagcaaaaacaccaaagcttggggcatcttgctacccgacttcaaactatactacaaggctgcagtaaccaaaacagcacagtactaataccaaaacagatatatagaccaatggaacagaacagaggcctcagtaataacatcacacatctacaaccatctgatctctaacaaacctgacaaaaacaagcaatggagaaagatttactacttaccaaatggtgctgaaagaactggctagccacattcagaaaacagaaactggaccccttctttacatcttatacaaacattatctcaagatggattaaagtcttaaatataaaacaccaaaccacaaaaaccctagaagaaaacctaggcaataccattcaggacataggcatgagcaaagacttcaggaataaaataccaaaagcaatcacaacaaaagctaaaattgacaaatgagatctaattaaactaacgagcttctgcacagcaaaagaatctatcatcagagtgaccaggcaacctacagaatgacagaaaatttttgcaatctatccatgtgtcagaggtctaatatccagaatctacaaggaacttaatttcacacacacacaaaaaaaaaacatcaaaaagtgagtaaagaatatgaacagactattctcaaaagaagacatttggctgggcgtggttgatcaagcctgtaatcccagcactttcagccatggaggcaggtggatcatgaggtcaggtgttcaagactagcctgggcaacatggtgaaaccatgtctctactaaaaacacaaaaaattagcatggtgttttggcgggtggctgtgattccagcttcttgggaggataaggcaggagaatcacttgaacctgggtggcagatgttgcagtgagctgagatcctgccactgcactccagcctgggtgacagagctagactccgtctttaaaataataataaataaaataaataaaaagaaaaggaagaaggagaagaagaagaggaagaagaagaagaagaagaagaagaagaagaagaagaagaagaagaagaagaagaagaagaagaagaagacatttatgtggtcaacaaacacacaaaaaggaaaaagaaaaaagctcatcatcactgatgattagagaaatgcaaatcaaaaccacaatgggataccatctcacaccatttggaatggcagttattaaaatgtcaggaacaacagatgctgatgaggctatggagaaatagaaacgcttttacactgctgggggcgggagtgtaaattacttcaaccattatggaagacagtgtggtgattccctaagtatctagaaccagaaataccatttgacccagcaatctcattactggttatatacccaaaggaatataaatcattctagcataaagacacatgcactcatatatctattgcagcactgtttacaataacaaagacttggaaccaacctaatgcccatcattgatagactggaaaaagaaaatgtggcacatatacaccatgaaataatattcagccataaaaagaatgagttcatgtcctttgcagggacgtgaatgacactggaaaccattctcttcagcaaactaacacgggaacaggaaacagaacaccatatgttctcactcatatgtgggagttgaacaatgagaacacatggacaccgggaacaaaacatcacacactggggcctgttagggtgttgaggtcaaggggagggagaaaattaggacaaatacctaatgcatatggggcttaaatcctagacgtcaggttgatagaagcagcaaaccaccatggcacatgtaaacctatgtaacaaacctgcacgttctgcacatgtattccagaacttaaagtaaaacaaactaacaaaaatgcactaaggctgagggggagtgggggtaggggcaggagtcaggcgggggtgggtgagtcctggagttttatccagtcattgacactgatgtgggaacagcccaatcaggcgcgcagttggagaggacaggagaggagggcgtggcttctggcgtttggcgggtctttgtctcttgctggcgctggcacaggaacttgggatccgtctcctctttcgcctcctccgctttgggagccccgggctactctttcacagcccctgttgccctgtgatctgtaggtccttggggacgcacagttaagatgacaggacatcctggaagctgggaaatggtgagtatacggggttcggcatcccgagaggggacagcaggctgtgaaaccggcaggaccggcccccacggttagctccgagtctcccgcagcttggccctcagtcccctgtggctgcaagatggccgctgggccagcatcgaggacccccacatccggcctggcccatccggtgctgtccctgggcagcgccctgctctgcgcccacagccatgagtatttcccagattgttcagggaggcctggtgggtcatcagggaaaaactgccactgggtgtttgcgtgggaggagctgcggcccgtggggtccccagtctctcttgttaaaaattaacgggagtctatgttaaaacgttaaccagtttatctgaacaaacagtgattggtgaaatggaaagcacccagccatgatttctggtccaccagaggggcataaaggaaaggctttcataagatgcatgagaaagcagcccaaattcaaaaattggttccagttatgtagtcaccttatttgaactatccagatggaaatgtcctggttacatattcagaggttaattgcatgtttgccattggttaaacgtgcattttgtttcaggctaagataatgctttataggaaatgtatttgagttaggttttagtttttgtttttttttttttaacctatgaacccaggacactagagccactttagtctaattttctgctctttaattattttaacactccagaggaggactggttttctcctgtgtttttttaatatatggcaagtggaacctctaatcgaccaccctgtttttcagcctaactcaggcttgtggtaaaattatcagttcccactttctttgctgcattctcaaatgcaacacaggagaacagctttcccttgcaaattcacaatgctgttaactatttgtcctttattatacatttcattaaagttttctattattggatttctttctacttctccctacagttctgcccatatttgctttttatatttagaagcctcccttttgggtgcataaatatatatagctatattcacttgacaaattaacctctattattattgtatggtaaactcatttcatgcttgtgagagacattgctagaaagtctattttgtctaatttaagcataactaccattgaactcctttggctattatttgcatggaatatcattttctatcctttcacttttagcctatgctcttaattcataattgagtctcttgtaagcagcatattacgaggtttaaaagtttcatttatccactctgtctgctttagtctcttttggctgttataacagaatatcacagactggtaattaataaagaacagaattttatttgactcatgattctggaggctgggaaggtaaaagaacatgttactggtatctgttgaaggtctagttgctggataataacatggccaaagatgtgagggagagacagcttttttttttttaatatataacagatccattcttgttaaaattagcccattcccataataagaacattaatccattcatgagggcagagtgcttatagcttaattaatttttaaaggttccacctcttaattctttcacattggccattttatcctaaattttggagatgacattcagtctacagaagtatctgtttagtagataatttaatctttttatttgtaaggtagtgataggtaagcagttactattgtacatttgtagttttctgtccattttaagtttgcttcttttttttctggttctgtctttcctgtggtattgttcatttttgttgagacaaagttatgctttcttgctcagactgaagttcagtggcatatcacagctcactgtagcctcaatctcctgggctcaagcaatcctccccccttagccacccaagtagcttggactacttggacatgtaccacaacacccaaggagcttatgattcttccaccttggcctccaaaagtgttggaattataagcaggagccactgtatccaatgtgtaatttttgttgtttgtgtatgctttaattactttctctttttctttactatgtttttttttcccccagtggttatcatgagacttatgtaaaacctcttgtattttaatagtctagtttaagatgataacaatttagagtattctgaatttcagtatgtatttaccatttttagtgacatttatactttagtatttttcatattgttagttagcatttcatcatatcaatgtgaagatttcttccagaccttggctggagaaggaaagaaggtgtgttttgcctgattcagggactatagagagaaccaagttctgcaggcctgtcacctaagtctcagatgagtatgaattcttttgtgtttttcacagatttttgcagtggcaggaccaagttcaaatgagtcatagccaagtttacagtaagatgtggtagtattctgttttgaaccgaggaccatgattggcaagcttgccacttggtcaagtgcttaccctctaaagatgtcttccttggtctttgcctccagctgggtgtcacaaactctgaactggattctaaggctttcatgaatgcacttatgtttcccgtggcagctgcattatgttgtgggggatgtgcatgccgaacctcccattctgtcgtcttgcttatgttactctcctttatgtttcactttctcaaatgaatgtcaagctggtgatttttagattcaaaaattctaaaataaattgctcaaatttccacattatgtaagctattaataaaatgtcttgtaggtgctacatatttattaaaatttttggttgtaattttaagctcactgcaggcagaaaggaatcattaacatttatattcttttttttagtctgtatctaaatgatggtatattttaattccagatatttactttatactgcagtaatgctcgtcatattttgcaaaatttatgttgttcttttatttggaaatataaggcttttttagctcttgaaatctatattatagtcatataattttattatgttttgtggtaagaagtgcagcaacatattgagaacataataaaattatcctgtatttttaatgattatttattaaattcctctcattagagcctgttattaatgattgtaatgtattttctgtataattttactgcaatttattaaattctaatgacttaaattgtctgcttttcatgagtgcacacagttgaatgctgtagatatctaaagaattatttttcggccggttgtggtggctcatgcctgtattcccagcaccttgggaggccaaggcgggtggatcacgaggtcaggagatcgagacaaccctgactaacatggtgaaaccccgtctctactaaatatacaaaaaattagccgggcatagtggcaggcgcctgtatccccagctactcaggaggctgaggcaggagaatggcgtgaactcagtggacagagtttgcagtgagccgagatcgcgccactgcactccagcctgggcaacagggcaagactctgtctcaaaaaaaaaaataaaaaaaaaaacggttattttccattgtaaatctatgttgtattcaggattttatgcacgaaaatctctcttcttattttcaagtccgtgttattgtgtttcttttcttgggagttatgttttctcagatcagttaaatgtatttttattttaaagcttgatatcatcagttgaaagataatttttagctcggtacactttatctcaatgtgatgtttaatatatgtgtgaattagctgtgtttgttgcttatagatatatctgtatgtttttcacttatgtaagtatgacatctttttccttgtttttttgtttttttcttttcagtttcagataggctttttttttttttaagagaattttaaaacagagtcgaaagaagagaaatcagttatttgtcctcttgcagggtggggagacaacttccttccccacaggtttgaggctatgcctaagtggtgagtcttgaggagatgcagaaaggatccatcccaggcacttggctggacttaagtaagcatagcctttaggccacaagacctgatggtttgggtactggtctggacataagtccccatcttcccagaaatatcatcttttgtctgcaacaactggctggagaaatatttcagaaagatgtgtgtctggaacacccaaagacatacttttcctttctccttggcataggccttgcagcactgaagaaagaccaggtttgcaatggagccttcaacagtcttcatccctatggaactcagggtctcatagggtgacaggagaggagacaaagctaacttgggaagagtctctgtccttcagcttctcccctactgaaacactatatattgggcccacagttcatcacaaaacacacatgctctctttctttctctcacacccaatcttgggaacccaaaaacttgatggcaggtagctctgggtatccttggtctggcattcacccactgggaatctaagctgtcctaaagctcttttcaatcacttctcactgtttccaggcccatgtgggtaggtgttccaggcttcattctttcaggctgatcataaaggcacagtgtgggaaaatcccctactgtgatggccattgctgggaagcaggaaaggctaagggcccactgctgcccaaggctagtatagatgccctctgctccactcatgtcctcaaagactgatatcaggtgcagcagctgctgtctggaatgttatcaaaccaggactgcacaggcactgcattctctgtgtggaagacgtaagaagcaggcgagttgtccaggatgagagttttcctcaggtccctccccagatggctgaggtcattgacatagcagccctggtggaacaaacgtgactcatgggctaggcaaccccagaacacctcacactggtccagcacacccatcacaatgtgtctggaattggtgggttcttgttctcactgacttcaagaatgaagccacagaccctcacggtgagtgttacagttcttaaaggtggcatgtctggagtttgttccttctgacattcggatgtgttgagagtttcttccctctggtgggctcgtggtctcgctggctcaggagtgaagctgcagacgttcgcggtgagtgttacagctcttaaggtggcacatctggagttgttcattcctccaggtgggttcgtggtctcgctggcttcaggagtgaagttgtggaccttcacagtgagtgttacagctcataaaggcattgtggacccaaagagtgagcagcagcaatatttattgcaaagagcaaaagaacaaagcttccacagtgtggaaggggacccgagtgggttgccactgctggctggggcagcctacttttattcccttatctggccccacccacatcttgctgattgttagagccgagtggtcttttttcacagggcgctgattggtgtgtttacaatccctgagctagacacaaaggttctccacatccccaccagtgtagctagatacagagtgttgattggtgcattcacaaaccctgagctagacacagggtgctgattggcatgtttacaaaccttgagctagatacagagtgccgattggtgtatttacaatccctgagctagacacaaagtttctccacgtccctaccagactcaggagcccagctggcttcacccagtggatcccccacagggtctgcaggtgtagctgcctgccagtctggcactgtgcacccgcacttctcagcccttgggtggttgatgggactgggtgccgtggagcagggggcgacactcatccaggaggcttgggcacacaggagcccaccgatgggggggaggctcaggcatggcgggctgcaggacccaagccctgccctgtgggatggcagctaaggcccagcgacaaattgagcacagcagctgctggccgaggtgttaagcccctcactgcctggggccggtggggccagccggcggctccgagtgtggggtccgccgagctcgcgctggccttcaagcactgcacgccgccctggttcccacacgcacctctccctccacacctcgtcgcaagctgagggagccggctccgaccttggccagcccagaaaggggctcccacagtgcagcgacaggctgaagggctcctaaagtgccgccaaagttggagcccaggcagaggaggcccggagagtgagcaagggttgtgaggactgccagcacgctgtcacctctcaacaggatctgcatacttgttcagtctggaatgaagagagcaatgaagaaaacacatttaaacagttcctccagtcatctcaggaactcatccatataaggcctcatggtcccctcaatctttacagtcactaggcagtcagcattgctgattggcttaatggagctatgcacaagggtttcatccatgtcagtgaccatacagatcgttccttgatttttctctgtcacctctgggagcaggcaggtccctgggatctgataaaactgatactggagacacttgagctgatccgacttagcaatggtgttgactccctccttatgtgtggagaactcagtgggggaacttgacttgccaacatgctgggtgcaagaacagcagaaaggtaccttctaagatgtcacaaacatgaggcctcttcggagagcactttggaaaccaggccttgcttgctaaggaccagggcatcttccctccatgcctgggtggtgatggagcctggttccatctaacaatcctgagggctcggctggctgggtgggaagacagcgggcacgttggctggactgggctggggggcatgggctggggcctgattcagttcccgagagtctgacttccacagctgttcacataccccttctcctttccatcacaggccgggaagagaggcggcctgtagggacggtggatggccttggcagcagctccccagggtgcccccagccccaaatcccccagcaggagcttcaggatcttcagtttgggtctaacctagggaatccacctcatactcatgttttttcaagttttattttaagttcagtggtccatatgtgataagcttttttttcaacttttattttaagtttaggggtccatgtgcaggatatgcaggtctcttacatagataaacgtgtgccattgtgctttactgcacagatcatctcatcacccaggtactaagcccagcatccgcagctattcttcctgctgctctccttcccctcccccatgccatgaaacaggtgtccagtgtgtgttgttcttcctgatgtgtccatgtgttctcattgatctgcttctgctaataagttagaataataataggtggtgtttggttttctgttcctgcattagtttgctgggagtaatggcttcaaattccaaccatgtccctgcaaaggacatcatctcattacattttatggcttcatagtgttccatggtgtatgtgtaccacattttctttatccagtatatcattgatgggcatgtagattgattacatgacgttgctattgtaaatattgctgcaatgaacatatgtatacatgtttatttaaaatagatttatattcctttgggtgtatgcccagtaatagtattgctgggtcaaatggtatttctgcttctaggtctttgaggaatctccacactctcttccacaatgcttgaaataatttacaatcccaccaacagtgtaaaagtgttcccttttctccacaacctcaccagcatctgtttttatttcttttttactttttattaatagacattgtaattggtgtgagatggtatctcattgttgttttgatgtgtatttatccagttatcagtgatgttgagctttccatgtttgttgggcacatgtatgtcttcttttgagatatgtctgttcatgtcctttgaccactttttaatggggttgtttgtttttctcttgtaaattttaagtccctcatagattctgggtattagatatttgtcagatgaataggttgcaaaatttttctcccattctctagcttctctgctctgatgatagcttctttggctctgtggaatctctttagtttaattagaccccattagtcaatttttgcttttgttgctatttcttttggtctttttgtcatcaaatctttcctcatgactatatcctgaatggtattttctagattttttcttctaaggtttttatagttttgggttttacattcaagtctttaatccatcttgagtcaatttttgtctatggtgttaggaagggttccagtcttaattctctgcacatgactagccagttatcctagcactatttattgaatagggagacttttccctaattccttgtttttgttgactttgtcaaagatcagtttgttgtaggtttttggctttatttctatgctctctattttgtttcatttgtctatgtgtctgtttctataccagtaccatgctgtttttgttactgtactcttctagtacagtttgaagttaggcaatgaccctttcagcttttttttttttttttcttaaggttggcttggctatttgggctcttttttggttccattttaattttaaaaagttttttttttctaattatctgaagaatgtcagtagttcaatgggaacagcattgaatctataaattacttagggcaatatgctcatattcgtggtactgattctttctctccgtgagcatggaatgtttctccatttgttttgtgtccactctgattcctctgagtagttgtttgtagttctccttgaagatatccttcactttccttcttagctgtattccttggtatttttttctctttatagcaaatgtgaatgaaagttcattcatgatttgtctccctgcttgcctgttgcttgtgtatgggaatgctagctacttttgcagattgattttatatcctgagattttgctactgctgcttatcaccttaagaagctttggggctgagacgaagaggctttctagatatagggtcaggtcatctgtaaacaaagataatttgactttctctctttctatttgaatactgtttatttcttcctctggcctgattttcctggacaagttttccgaatgggagttgtaatgcgagtggtgagagagagcatacttttcttgtgccggttttcagggggaatgtttccagcttttgcatattcagtatgatattggctgtgggtttgttgtatatggctcttcttattttgaggtatgtttcttcagttcctaatttattgagaattttaaacgtgaaggaatgttgaattttattgggtgctttttctgcatctattgaggtaatcatgtggtttttttatttagttttctttatgtgatgagtcacatttgttgatttgcatatgttgaatcaaccttgcatcctggagacaaagccaattccattgtggtggatgcactttttaatgtgctgctgggtttggtttgccagtattttattgaggatgtttgcacagtgttcatcaaagacattggcatgatgtgttgttgttgttgttgttgtatctatgttaggttttggtatcaggatgatgctggcctgatagaatgagttagacagaacttctttgtcttcaattttttttggatagttttaggagaaaatgtactatctcctctttacctcaagtcaaattcagcttgcttggtaggctagttcttactgtctcaatttcagaacacattattgatctattcagggttcagtcttgtagagagtttattttgcaaggaaattgtccatttcttctagattttctggtttatgagcatagaggtgtttatagtattctctgatcgttgttcttatttccatgggatcagtgatgatatctcccttattatttctatttgtgtttggttctttcttttcttatttatttgcctaactagtgttccatctagtttataaatttttttttttttcataaaaacagctcctggattggttgagttttttttttttttttttggaagagttctcagtgtctctatctccttcagctctactctgatcttggctatttcttatcttctgctagctttcaggtttgttttcacttggttttcttgttcttttaaccaagatgttaggctgttaactttagatctttctaatttttttttttcttgtgggagagtttcactctgtcacccaggctggagtacagtggcataatctcggctcactgcaacctccacttctcggttttaagtcacttctgctgtctcagcctcctgagtagctgggattacagatgtgaatcaccacacctagctaatttttgtatttttttgtagagatatggttttgctgttggccaggctggtcctgaacacctggtctcaagtgatctgcctaccccagcctcccaaagtgctggaattacaggcatgagccaccatgaccggccctttctagctttttgatgtggacattagtgctataaatttccctcttttcttggtttctagtgattattttattctatcttggtgagtagtcagggaaataatcttaaatttacaatcaacttatagtttaaatctaaataattaagtgagaagaaccctttgttatttgaaggggatgtttgaagattttgtaaccgtgccttttaggtagtcctaaatttctaattgtagttaaaaacatgccattttcatttctaacattttaagtatatggtttagaagtggtaagtatagttctatttttttttgcaataggttttagataatttttgtcttacaaaagtaaaagtgaatactcattaattctgaaacaagttagttagcttgctttagttagatagcaagagaagggtccctggaaagtccctggcccttgggtcagtgtctcatccctgcataatataaaaggaatcctggaaaaaatcaagctgcagacactaacaaggtaactagcacatggtgttgtgcttggagacctgcccatggctgcacagacagaaaaacctctggcatatttggataaaaacttgtacaaacctccagctcactgagataagggaacaagaccgacctggcatagaaatgcctttgtttgtccaggcacagtggctcatgcccgtaattccagcaatttgggaggcagaagtgggcggatcacctgaggtcgggagttcgagaccagcatgaccaacatggagaaaaatacaaaattagccgggcatggtgcctcatgcctgtaatcccagctacttgggaggctgaggcaggagaatcacttaaacccaggtggcggagtttgctgtgggccgagatcgcaccattgcactccagcctgggcaacaagagcaaaactacgtctcaaaataaataaattaataaataataagaaagtacatctcaaaaacaaaaatgaaagaaagaaagaaaagaaaaagaaaaaaagaaacgcctttgtactttgtgcagtcagtgggctcccaggaaaatgtttcttctccttttgtgggcataagcacagtgggctctggtgcattccggtcgacactctcctttatttggactgtaagtcagacctctgtgaataattacttcagcccctgattgctcccgggacaagctcctgcgccaagctttcactttagcttctgataagtcctgggccaatctaaatagcatctatgaatcatcccttcagctcctgattggtcccgggtcaaagtcctgggccaagctgagccacacttttttcaagacagcctgttaactaggcacatttccttctcttcctttcccagtccataaaaaccttgggccccagcctcacagaggtcaccccattcagaaactatctctgctggcaaagagctttcttctcttgcttatcaaactttcactctaacctcacctttgtgttcacgctccttaatctccctagaagtagaacaaagaactttcgatgctatctcagactatgagagactgttacatcttggtgcactgctgagactacaacacttggtttctttgagtttgactaaatattttacataggtgtaattatacagttttcctttttgactgtcttgttttacttaacagaatgttttcgagatttgtccttattgtagtacttttcaagatttccttatttttaaggctgaatgctatccagtgaatatacgtgccctgtttgttgaatctactcatccttaaaggtacatttgcttccaggtagtatgtttgtgagtaatgctacagtgtacataaatgtgcatatatctattccatgttctgctttgcctgtttgggatatttttcacacactgatttagtaccatgtgtattcccttgcttttgttgtctgattcgttgatgttacatcccccaaattattgccgagaccaattgtcatgaagcttcacccttctgtattgtgctaggaattttacagctatagattttacattatagtcttcatattttaaaattgacacatgtaattgtacaaattttggggaaacaattatgtatatatgttgtatagcaataaaaatcagagtacttagtgtaattattgcctcatacatttgttatttttgtggtgagaacattcaaaagcttcttctctagctatttttttatatctttatatattaactttttttagagacaggatcttgctctaacacacagattggagtgcagtggtgcaatcctagctcactgtaacctcaaacaatcttctaacctcagcttcccaattagctgagactacaggaacctgcctccatgcctggataatgttttaatttttcatagagacagggtcacactatgttgtccaggctcatcttgaacttctgacatcaagtgattctcctacctcattctcccaaaatgtatggatggcaggaatgtgccaccacaactggtctcttttagctattttgtaatttgagataacttttcattaattattattattctgctgtgtaacaaaaaacaaaaacttatttctcctatctaattgtaacacaatacttttgaagctgccttttcccatctccctgcttcagtctctgggaacccctgttgtactctttgcttatatcaacccttttttcaggttcctcaaatgagtgagataataagatcataaagtatttgtgtttctctatgtggcttattttacttaacatggtatgctcaaggttcatccatgctcttttaactgacagaattttatcctttcttatagctgaatagtatttcactgtgcatatatagtacattttccttatccatttatctgttgctgtacatttgaattgattccatatataagctattataactagttctgtaactaacatggaaatgcaaatatctttttgacacagtgatatcctttcttttgtatatacatgcaggagtaaaattgctggatcatgtaatacatctatttttaatttctttcagaaacctccatagtattttctatagtggccatactaatttacaattccaccaacaatgtatacattcactcattttatatcctcattagtacttgttttatttatttatttatttttattatagccattctaaatgggagtgaggcggtacctcattgtggtttggattttcatttccttagtgattagtaatgtagaacatatttttatgttccagttagccatttttgtatcactttttgacaaacatctattaagatcttttgcatttttttaattagattataagtgtattttattttgagattttaaagtttcttatttattctgaatattagccttttgtcatatgtatagcctgaaagcattttcttttattgcctaagctgtctcttcaatcttttagtttttttaatatggaaaagcattttagtttgacataatgttgtttgcttatttttgattttgttgcctatgttttgacatgttattttaataatcctttccccgtcgaatgttataaagcattttttagtttttctctaatagtttcataattgatagcattacatttaagtctttagtttgaattgattttcatatatggcaaggcacaggggtctagtataatttttctgaatttaaatatttaaatggccctgcatcatttattgaagaaattagcttttccctaaagtgtgttcttggcaattttgttgacaatcagttggctttaggtgcataaactaacttctgggcttcttgggcacattagtctatgtgtttgtttttatgccagtacagtgctcttttggttactatagctttgtagcaagttttgaagtttgataaagtgatgcctttagctttgcttattttgctcaaagttatttgtctattcagagttttttgtggatccacataaatttaaaatattttttctatttctgtgaaaaaatgtcattgatattttgataaaaatattacctcccacagggtccctcccaggacatgtggggattattacaatttaagatgagatttgattggggacacagagccaaaccctgtcaattacttaaatccaggagttcgacactaccccgggcaatattgtgacaagctattggtaaaaaatattttcacagattactcaggcattgtggaatgttcctgtagtctcaggaagttggaggctgacgtaagattattccttgagttccccaggaacttgaggctgcattgagctataatcatcgtattgtattcctgtctgggtgagagagtaagacctctttttagaatttcaaatttattttagatttaggaggtacctacacaggttttttacatgggtattttgtataatgctgaggtttgaagtatgagtaattccatcaatcaggtagtgagcatagtactaagtagacagtttttcagttcttggtccctccctctctccaccctctaagagttgtctattatttttgtttttctgtccatgtgtacccagtgttaatttccatttataagtgagaatatgcagtattttcattttccatttctgcattaatttgctttgtataatggcctttagttgtgttaacgttgctgcaaaggaggttttttttgtttgtttttgctaagtagtattgctgtacatgtgacactttttaaattcaatttaccatcaataggctggacatggtggctgatgcctgtaatcccagtgctgtgggaggccaaggcgggtggatcatgaggtcaggagatcgagaccatcctggacaacgtaatgaaaccccgtatgtactggaaatacaaaagttagccaggcttggtggcatgcgcctatagtcccagctactcgggtggctgaggaaggagaattgcttgaacctgggaggtggagattgtagtgagctgagatcgtgccactgcactccagcctgggcaacagagtgagacgtcatctcaaaaaaataaaaaattaccatgaataggcacgtaggttgattcaggtccttcctcttatgaatagtgtagtgatgaaccaacaagtgcatgtgctattttggtagaatagtttattctcttttgggtatatacccagcggtgaaattgctgggttgaatcacagtttaactctcagttatttggaaaatctccaagctgttctccacagtggctgaactaatttacattcctattaacagtgtataagtggttttttccctctaaaaccccatcaacatctattatcattttactttttaacaaaaaccattctaactggtgtacaatggtgtcttattgtggtttttatttacatttccttgatggttagtgatgataagcttttttcatgttatttggccacttgtatgtgttcttttgaagagtgtctgttattgcccactttttcatggggtaattttttccttgtgaattctttaagtttcttatagattctgagtattagattttgtcaggttcataggttatgaatatttttgccattctgctagctttggggtaagttagtttttatttttctagtttctctaagtgtgatgttaaattgttagtttgagatcattctaacttcttgatgcaggtatttagcactctcaactttcctcttaacagagctcttcctacaacccagacattttgttatattgtgtctcttctatttcaaaatctttttaattttctgccttaatttttttgtttatccaaaattcattcaggagcaagttgtttaatttcaatatcattctgtgattttgtgagattttcttggtattgatttttatctttgttccattgtggcctgtcatattctgtgagcagatgagaagaatttactttctttagatgatgtgttgcatatactataaatgtctattagtttcaattgatcaagtgtcgaatcaaactccagaatttctttgttaagtttctgcctagataatctgtcaaacacttagtggggagttgcattcccctactattattgtgtgtctacttgaggcttattgtagttctagcagtaattgttgtataactctatgttccccaaagttgggtgcatctacatttacgatagttaagtcttcttgttgaattgaaccctttatcgttacgcaatacctttctttgttttattttactattaatgatttaaagctattttttcttaaaagagaaacaattccaggtatggtagcttgtgccagcactttcagactgaagcagtcggattgcctgagaccaggagtttgagaccagccgaggcaacacagcaacatactgtttgtacaaatttttttaaagaaactatacaggaggggtaatgtgcacaactgtggtcatatttactcaggagacataggtggcatgactgcttgacttccgaaatttgaggttacagtgagctgtgattccaccagtgtactctgtcccaggagataaagtaagatcnnnnnnnnnnnnnnnnnnnnnnnnnnnnnnnnnnnnnnnnnnnnnnnnnnnnnnnnnnnnnnnnnnnnnnnnnnnnnnnnnnnnnnnnnnnnnnnnnnnnnnnnnnnnnnnnnnnnnnnnnnnnnnnnnnnnnnnnnnnnnnnnnnnnnnnnnnnnnnnnnnnnnnnnnnnnnnnnnnnnnnnnnnnnnnnnnnnnnnnnnnnnnnnnnnnnnnnnnnnnnnnnnnnnnnnnnnnnnnnnnnnnnnnnnnnnnnnnnnnnnnnnnnnnnnnnnnnnnnnnnnnnnnnnnnnnnnnnnnnnnnnnnnnnnnnnnnnnnnnnnnnnnnnnnnnnnnnnnnnnnnnnnnnnnnnnnnnnnnnnnnnnnnnnnnnnnnnnnnnnnnnnnnnnnnnnnnnnnnnnnnnnnnnnnnnnnnnnnnnnnnnnnnnnnnnnnnnnnnnnnnnnnnnnnnnnnnnnnnnnnnnnnnnnnnnnnnnnnnnnnnnnnnnnnnnnnnnnnnnnnnnnnnnnnnnnnnnnnnnnnnnnnnnnnnnnnnnnnnnnnnnnnnnnnnnnnnnnnnnnnnnnnnnnnnnnnnnnnnnnnnnnnnnnnnnnnnnnnnnnnnnnnnnnnnnnnnnnnnnnnnnnnnnnnnnnnnnnnnnnnnnnnnnnnnnnnnnnnnnnnnnnnnnnnnnnnnnnnnnnnnnnnnnnnnnnnnnnnnnnnnnnnnnnnnnnnnnnnnnnnnnnnnnnnnnnnnnnnnnnnnnnnnnnnnnnnnnnnnnnnnnnnnnnnnnnnnnnnnnnnnnnnnnnnnnnnnnnnnnnnnnnnnnnnnnnnnnnnnnnnnnnnnnnnnnnnnnnnnnnnnnnnnnnnnnnnnnnnnnnnnnnnnnnnnnnnnnnnnnnnnnnnnnnnnnnnnnnnnnnnnnnnnnnnnnnnnnnnnnnnnnnnnnnnnnnnnnnnnnnnnnnnnnnnnnnnnnnnnnnnnnnnnnnnnnnnnnnnnnnnnnnnnnnnnnnnnnnnnnnnnnnnnnnnnnnnnnnnnnnnnnnnnnnnnnnnnnnnnnnnnnnnnnnnnnnnnnnnnnnnnnnnnnnnnnnnnnnnnnnnnnnnnnnnnnnnnnnnnnnnnnnnnnnnnnnnnnnnnnnnnnnnnnnnnnnnnnnnnnnnnnnnnnnnnnnnnnnnnnnnnnnnnnnnnnnnnnnnnnnnnnnnnnnnnnnnnnnnnnnnnnnnnnnnnnnnnnnnnnnnnnnnnnnnnnnnnnnnnnnnnnnnnnnnnnnnnnnnnnnnnnnnnnnnnnnnnnnnnnnnnnnnnnnnnnnnnnnnnnnnnnnnnnnnnnnnnnnnnnnnnnnnnnnnnnnnnnnnnnnnnnnnnnnnnnnnnnnnnnnnnnnnnnnnnnnnnnnnnnnnnnnnnnnnnnnnnnnnnnnnnnnnnnnnnnnnnnnnnnnnnnnnnnnnnnnnnnnnnnnnnnnnnnnnnnnnnnnnnnnnnnnnnnnnnnnnnnnnnnnnnnnnnnnnnnnnnnnnnnnnnnnnnnnnnnnnnnnnnnnnnnnnnnnnnnnnnnnnnnnnnnnnnnnnnnnnnnnnnnnnnnnnnnnnnnnnnnnnnnnnnnnnnnnnnnnnnnnnnnnnnnnnnnnnnnnnnnnnnnnnnnnnnnnnnnnnnnnnnnnnnnnnnnnnnnnnnnnnnnnnnnnnnnnnnnnnnnnnnnnnnnnnnnnnnnnnnnnnnnnnnnnnnnnnnnnnnnnnnnnnnnnnnnnnnnnnnnnnnnnnnnnnnnnnnnnnnnnnnnnnnnnnnnnnnnnnnnnnnnnnnnnnnnnnnnnnnnnnnnnnnnnnnnnnnnnnnnnnnnnnnnnnnnnnnnnnnnnnnnnnnnnnnnnnnnnnnnnnnnnnnnnnnnnnnnnnnnnnnnnnnnnnnnnnnnnnnnnnnnnnnnnnnnnnnnnnnnnnnnnnnnnnnnnnnnnnnnnnnnnnnnnnnnnnnnnnnnnnnnnnnnnnnnnnnnnnnnnnnnnnnnnnnnnnnnnnnnnnnnnnnnnnnnnnnnnnnnnnnnnnnnnnnnnnnnnnnnnnnnnnnnnnnnnnnnnnnnnnnnnnnnnnnnnnnnnnnnnnnnnnnnnnnnnnnnnnnnnnnnnnnnnnnnnnnnnnnnnnnnnnnnnnnnnnnnnnnnnnnnnnnnnnnnnnnnnnnnnnnnnnnnnnnnnnnnnnnnnnnnnnnnnnnnnnnnnnnnnnnnnnnnnnnnnnnnnnnnnnnnnnnnnnnnnnnnnnnnnnnnnnnnnnnnnnnnnnnnnnnnnnnnnnnnnnnnnnnnnnnnnnnnnnnnnnnnnnnnnnnnnnnnnnnnnnnnnnnnnnnnnnnnnnnnnnnnnnnnnnnnnnnnnnnnnnnnnnnnnnnnnnnnnnnnnnnnnnnnnnnnnnnnnnnnnnnnnnnnnnnnnnnnnnnnnnnnnnnnnnnnnnnnnnnnnnnnnnnnnnnnnnnnnnnnnnnnnnnnnnnnnnnnnnnnnnnnnnnnnnnnnnnnnnnnnnnnnnnnnnnnnnnnnnnnnnnnnnnnnnnnnnnnnnnnnnnnnnnnnnnnnnnnnnnnnnnnnnnnnnnnnnnnnnnnnnnnnnnnnnnnnnnnnnnnnnnnnnnnnnnnnnnnnnnnnnnnnnnnnnnnnnnnnnnnnnnnnnnnnnnnnnnnnnnnnnnnnnnnnnnnnnnnnnnnnnnnnnnnnnnnnnnnnnnnnnnnnnnnnnnnnnnnnnnnnnnnnnnnnnnnnnnnnnnnnnnnnnnnnnnnnnnnnnnnnnnnnnnnnnnnnnnnnnnnnnnnnnnnnnnnnnnnnnnnnnnnnnnnnnnnnnnnnnnnnnnnnnnnnnnnnnnnnnnnnnnnnnnnnnnnnnnnnnnnnnnnnnnnnnnnnnnnnnnnnnnnnnnnnnnnnnnnnnnnnnnnnnnnnnnnnnnnnnnnnnnnnnnnnnnnnnnnnnnnnnnnnnnnnnnnnnnnnnnnnnnnnnnnnnnnnnnnnnnnnnnnnnnnnnnnnnnnnnnnnnnnnnnnnnnnnnnnnnnnnnnnnnnnnnnnnnnnnnnnnnnnnnnnnnnnnnnnnnnnnnnnnnnnnnnnnnnnnnnnnnnnnnnnnnnnnnnnnnnnnnnnnnnnnnnnnnnnnnnnnnnnnnnnnnnnnnnnnnnnnnnnnnnnnnnnnnnnnnnnnnnnnnnnnnnnnnnnnnnnnnnnnnnnnnnnnnnnnnnnnnnnnnnnnnnnnnnnnnnnnnnnnnnnnnnnnnnnnnnnnnnnnnnnnnnnnnnnnnnnnnnnnnnnnnnnnnnnnnnnnnnnnnnnnnnnnnnnnnnnnnnnnnnnnnnnnnnnnnnnnnnnnnnnnnnnnnnnnnnnnnnnnnnnnnnnnnnnnnnnnnnnnnnnnnnnnnnnnnnnnnnnnnnnnnnnnnnnnnnnnnnnnnnnnnnnnnnnnnnnnnnnnnnnnnnnnnnnnnnnnnnnnnnnnnnnnnnnnnnnnnnnnnnnnnnnnnnnnnnnnnnnnnnnnnnnnnnnnnnnnnnnnnnnnnnnnnnnnnnnnnnnnnnnnnnnnnnnnnnnnnnnnnnnnnnnnnnnnnnnnnnnnnnnnnnnnnnnnnnnnnnnnnnnnnnnnnnnnnnnnnnnnnnnnnnnnnnnnnnnnnnnnnnnnnnnnnnnnnnnnnnnnnnnnnnnnnnnnnnnnnnnnnnnnnnnnnnnnnnnnnnnnnnnnnnnnnnnnnnnnnnnnnnnnnnnnnnnnnnnnnnnnnnnnnnnnnnnnnnnnnnnnnnnnnnnnnnnnnnnnnnnnnnnnnnnnnnnnnnnnnnnnnnnnnnnnnnnnnnnnnnnnnnnnnnnnnnnnnnnnnnnnnnnnnnnnnnnnnnnnnnnnnnnnnnnnnnnnnnnnnnnnnnnnnnnnnnnnnnnnnnnnnnnnnnnnnnnnnnnnnnnnnnnnnnnnnnnnnnnnnnnnnnnnnnnnnnnnnnnnnnnnnnnnnnnnnnnnnnnnnnnnnnnnnnnnnnnnnnnnnnnnnnnnnnnnnnnnnnnnnnnnnnnnnnnnnnnnnnnnnnnnnnnnnnnnnnnnnnnnnnnnnnnnnnnnnnnnnnnnnnnnnnnnnnnnnnnnnnnnnnnnnnnnnnnnnnnnnnnnnnnnnnnnnnnnnnnnnnnnnnnnnnnnnnnnnnnnnnnnnnnnnnnnnnnnnnnnnnnnnnnnnnnnnnnnnnnnnnnnnnnnnnnnnnnnnnnnnnnnnnnnnnnnnnnnnnnnnnnnnnnnnnnnnnnnnnnnnnnnnnnnnnnnnnnnnnnnnnnnnnnnnnnnnnnnnnnnnnnnnnnnnnnnnnnnnnnnnnnnnnnnnnnnnnnnnnnnnnnnnnnnnnnnnnnnnnnnnnnnnnnnnnnnnnnnnnnnnnnnnnnnnnnnnnnnnnnnnnnnnnnnnnnnnnnnnnnnnnnnnnnnnnnnnnnnnnnnnnnnnnnnnnnnnnnnnnnnnnnnnnnnnnnnnnnnnnnnnnnnnnnnnnnnnnnnnnnnnnnnnnnnnnnnnnnnnnnnnnnnnnnnnnnnnnnnnnnnnnnnnnnnnnnnnnnnnnnnnnnnnnnnnnnnnnnnnnnnnnnnnnnnnnnnnnnnnnnnnnnnnnnnnnnnnnnnnnnnnnnnnnnnnnnnnnnnnnnnnnnnnnnnnnnnnnnnnnnnnnnnnnnnnnnnnnnnnnnnnnnnnnnnnnnnnnnnnnnnnnnnnnnnnnnnnnnnnnnnnnnnnnnnnnnnnnnnnnnnnnnnnnnnnnnnnnnnnnnnnnnnnnnnnnnnnnnnnnnnnnnnnnnnnnnnnnnnnnnnnnnnnnnnnnnnnnnnnnnnnnnnnnnnnnnnnnnnnnnnnnnnnnnnnnnnnnnnnnnnnnnnnnnnnnnnnnnnnnnnnnnnnnnnnnnnnnnnnnnnnnnnnnnnnnnnnnnnnnnnnnnnnnnnnnnnnnnnnnnnnnnnnnnnnnnnnnnnnnnnnnnnnnnnnnnnnnnnnnnnnnnnnnnnnnnnnnnnnnnnnnnnnnnnnnnnnnnnnnnnnnnnnnnnnnnnnnnnnnnnnnnnnnnnnnnnnnnnnnnnnnnnnnnnnnnnnnnnnnnnnnnnnnnnnnnnnnnnnnnnnnnnnnnnnnnnnnnnnnnnnnnnnnnnnnnnnnnnnnnnnnnnnnnnnnnnnnnnnnnnnnnnnnnnnnnnnnnnnnnnnnnnnnnnnnnnnnnnnnnnnnnnnnnnnnnnnnnnnnnnnnnnnnnnnnnnnnnnnnnnnnnnnnnnnnnnnnnnnnnnnnnnnnnnnnnnnnnnnnnnnnnnnnnnnnnnnnnnnnnnnnnnnnnnnnnnnnnnnnnnnnnnnnnnnnnnnnnnnnnnnnnnnnnnnnnnnnnnnnnnnnnnnnnnnnnnnnnnnnnnnnnnnnnnnnnnnnnnnnnnnnnnnnnnnnnnnnnnnnnnnnnnnnnnnnnnnnnnnnnnnnnnnnnnnnnnnnnnnnnnnnnnnnnnnnnnnnnnnnnnnnnnnnnnnnnnnnnnnnnnnnnnnnnnnnnnnnnnnnnnnnnnnnnnnnnnnnnnnnnnnnnnnnnnnnnnnnnnnnnnnnnnnnnnnnnnnnnnnnnnnnnnnnnnnnnnnnnnnnnnnnnnnnnnnnnnnnnnnnnnnnnnnnnnnnnnnnnnnnnnnnnnnnnnnnnnnnnnnnnnnnnnnnnnnnnnnnnnnnnnnnnnnnnnnnnnnnnnnnnnnnnnnnnnnnnnnnnnnnnnnnnnnnnnnnnnnnnnnnnnnnnnnnnnnnnnnnnnnnnnnnnnnnnnnnnnnnnnnnnnnnnnnnnnnnnnnnnnnnnnnnnnnnnnnnnnnnnnnnnnnnnnnnnnnnnnnnnnnnnnnnnnnnnnnnnnnnnnnnnnnnnnnnnnnnnnnnnnnnnnnnnnnnnnnnnnnnnnnnnnnnnnnnnnnnnnnnnnnnnnnnnnnnnnnnnnnnnnnnnnnnnnnnnnnnnnnnnnnnnnnnnnnnnnnnnnnnnnnnnnnnnnnnnnnnnnnnnnnnnnnnnnnnnnnnnnnnnnnnnnnnnnnnnnnnnnnnnnnnnnnnnnnnnnnnnnnnnnnnnnnnnnnnnnnnnnnnnnnnnnnnnnnnnnnnnnnnnnnnnnnnnnnnnnnnnnnnnnnnnnnnnnnnnnnnnnnnnnnnnnnnnnnnnnnnnnnnnnnnnnnnnnnnnnnnnnnnnnnnnnnnnnnnnnnnnnnnnnnnnnnnnnnnnnnnnnnnnnnnnnnnnnnnnnnnnnnnnnnnnnnnnnnnnnnnnnnnnnnnnnnnnnnnnnnnnnnnnnnnnnnnnnnnnnnnnnnnnnnnnnnnnnnnnnnnnnnnnnnnnnnnnnnnnnnnnnnnnnnnnnnnnnnnnnnnnnnnnnnnnnnnnnnnnnnnnnnnnnnnnnnnnnnnnnnnnnnnnnnnnnnnnnnnnnnnnnnnnnnnnnnnnnnnnnnnnnnnnnnnnnnnnnnnnnnnnnnnnnnnnnnnnnnnnnnnnnnnnnnnnnnnnnnnnnnnnnnnnnnnnnnnnnnnnnnnnnnnnnnnnnnnnnnnnnnnnnnnnnnnnnnnnnnnnnnnnnnnnnnnnnnnnnnnnnnnnnnnnnnnnnnnnnnnnnnnnnnnnnnnnnnnnnnnnnnnnnnnnnnnnnnnnnnnnnnnnnnnnnnnnnnnnnnnnnnnnnnnnnnnnnnnnnnnnnnnnnnnnnnnnnnnnnnnnnnnnnnnnnnnnnnnnnnnnnnnnnnnnnnnnnnnnnnnnnnnnnnnnnnnnnnnnnnnnnnnnnnnnnnnnnnnnnnnnnnnnnnnnnnnnnnnnnnnnnnnnnnnnnnnnnnnnnnnnnnnnnnnnnnnnnnnnnnnnnnnnnnnnnnnnnnnnnnnnnnnnnnnnnnnnnnnnnnnnnnnnnnnnnnnnnnnnnnnnnnnnnnnnnnnnnnnnnnnnnnnnnnnnnnnnnnnnnnnnnnnnnnnnnnnnnnnnnnnnnnnnnnnnnnnnnnnnnnnnnnnnnnnnnnnnnnnnnnnnnnnnnnnnnnnnnnnnnnnnnnnnnnnnnnnnnnnnnnnnnnnnnnnnnnnnnnnnnnnnnnnnnnnnnnnnnnnnnnnnnnnnnnnnnnnnnnnnnnnnnnnnnnnnnnnnnnnnnnnnnnnnnnnnnnnnnnnnnnnnnnnnnnnnnnnnnnnnnnnnnnnnnnnnnnnnnnnnnnnnnnnnnnnnnnnnnnnnnnnnnnnnnnnnnnnnnnnnnnnnnnnnnnnnnnnnnnnnnnnnnnnnnnnnnnnnnnnnnnnnnnnnnnnnnnnnnnnnnnnnnnnnnnnnnnnnnnnnnnnnnnnnnnnnnnnnnnnnnnnnnnnnnnnnnnnnnnnnnnnnnnnnnnnnnnnnnnnnnnnnnnnnnnnnnnnnnnnnnnnnnnnnnnnnnnnnnnnnnnnnnnnnnnnnnnnnnnnnnnnnnnnnnnnnnnnnnnnnnnnnnnnnnnnnnnnnnnnnnnnnnnnnnnnnnnnnnnnnnnnnnnnnnnnnnnnnnnnnnnnnnnnnnnnnnnnnnnnnnnnnnnnnnnnnnnnnnnnnnnnnnnnnnnnnnnnnnnnnnnnnnnnnnnnnnnnnnnnnnnnnnnnnnnnnnnnnnnnnnnnnnnnnnnnnnnnnnnnnnnnnnnnnnnnnnnnnnnnnnnnnnnnnnnnnnnnnnnnnnnnnnnnnnnnnnnnnnnnnnnnnnnnnnnnnnnnnnnnnnnnnnnnnnnnnnnnnnnnnnnnnnnnnnnnnnnnnnnnnnnnnnnnnnnnnnnnnnnnnnnnnnnnnnnnnnnnnnnnnnnnnnnnnnnnnnnnnnnnnnnnnnnnnnnnnnnnnnnnnnnnnnnnnnnnnnnnnnnnnnnnnnnnnnnnnnnnnnnnnnnnnnnnnnnnnnnnnnnnnnnnnnnnnnnnnnnnnnnnnnnnnnnnnnnnnnnnnnnnnnnnnnnnnnnnnnnnnnnnnnnnnnnnnnnnnnnnnnnnnnnnnnnnnnnnnnnnnnnnnnnnnnnnnnnnnnnnnnnnnnnnnnnnnnnnnnnnnnnnnnnnnnnnnnnnnnnnnnnnnnnnnnnnnnnnnnnnnnnnnnnnnnnnnnnnnnnnnnnnnnnnnnnnnnnnnnnnnnnnnnnnnnnnnnnnnnnnnnnnnnnnnnnnnnnnnnnnnnnnnnnnnnnnnnnnnnnnnnnnnnnnnnnnnnnnnnnnnnnnnnnnnnnnnnnnnnnnnnnnnnnnnnnnnnnnnnnnnnnnnnnnnnnnnnnnnnnnnnnnnnnnnnnnnnnnnnnnnnnnnnnnnnnnnnnnnnnnnnnnnnnnnnnnnnnnnnnnnnnnnnnnnnnnnnnnnnnnnnnnnnnnnnnnnnnnnnnnnnnnnnnnnnnnnnnnnnnnnnnnnnnnnnnnnnnnnnnnnnnnnnnnnnnnnnnnnnnnnnnnnnnnnnnnnnnnnnnnnnnnnnnnnnnnnnnnnnnnnnnnnnnnnnnnnnnnnnnnnnnnnnnnnnnnnnnnnnnnnnnnnnnnnnnnnnnnnnnnnnnnnnnnnnnnnnnnnnnnnnnnnnnnnnnnnnnnnnnnnnnnnnnnnnnnnnnnnnnnnnnnnnnnnnnnnnnnnnnnnnnnnnnnnnnnnnnnnnnnnnnnnnnnnnnnnnnnnnnnnnnnnnnnnnnnnnnnnnnnnnnnnnnnnnnnnnnnnnnnnnnnnnnnnnnnnnnnnnnnnnnnnnnnnnnnnnnnnnnnnnnnnnnnnnnnnnnnnnnnnnnnnnnnnnnnnnnnnnnnnnnnnnnnnnnnnnnnnnnnnnnnnnnnnnnnnnnnnnnnnnnnnnnnnnnnnnnnnnnnnnnnnnnnnnnnnnnnnnnnnnnnnnnnnnnnnnnnnnnnnnnnnnnnnnnnnnnnnnnnnnnnnnnnnnnnnnnnnnnnnnnnnnnnnnnnnnnnnnnnnnnnnnnnnnnnnnnnnnnnnnnnnnnnnnnnnnnnnnnnnnnnnnnnnnnnnnnnnnnnnnnnnnnnnnnnnnnnnnnnnnnnnnnnnnnnnnnnnnnnnnnnnnnnnnnnnnnnnnnnnnnnnnnnnnnnnnnnnnnnnnnnnnnnnnnnnnnnnnnnnnnnnnnnnnnnnnnnnnnnnnnnnnnnnnnnnnnnnnnnnnnnnnnnnnnnnnnnnnnnnnnnnnnnnnnnnnnnnnnnnnnnnnnnnnnnnnnnnnnnnnnnnnnnnnnnnnnnnnnnnnnnnnnnnnnnnnnnnnnnnnnnnnnnnnnnnnnnnnnnnnnnnnnnnnnnnnnnnnnnnnnnnnnnnnnnnnnnnnnnnnnnnnnnnnnnnnnnnnnnnnnnnnnnnnnnnnnnnnnnnnnnnnnnnnnnnnnnnnnnnnnnnnnnnnnnnnnnnnnnnnnnnnnnnnnnnnnnnnnnnnnnnnnnnnnnnnnnnnnnnnnnnnnnnnnnnnnnnnnnnnnnnnnnnnnnnnnnnnnnnnnnnnnnnnnnnnnnnnnnnnnnnnnnnnnnnnnnnnnnnnnnnnnnnnnnnnnnnnnnnnnnnnnnnnnnnnnnnnnnnnnnnnnnnnnnnnnnnnnnnnnnnnnnnnnnnnnnnnnnnnnnnnnnnnnnnnnnnnnnnnnnnnnnnnnnnnnnnnnnnnnnnnnnnnnnnnnnnnnnnnnnnnnnnnnnnnnnnnnnnnnnnnnnnnnnnnnnnnnnnnnnnnnnnnnnnnnnnnnnnnnnnnnnnnnnnnnnnnnnnnnnnnnnnnnnnnnnnnnnnnnnnnnnnnnnnnnnnnnnnnnnnnnnnnnnnnnnnnnnnnnnnnnnnnnnnnnnnnnnnnnnnnnnnnnnnnnnnnnnnnnnnnnnnnnnnnnnnnnnnnnnnnnnnnnnnnnnnnnnnnnnnnnnnnnnnnnnnnnnnnnnnnnnnnnnnnnnnnnnnnnnnnnnnnnnnnnnnnnnnnnnnnnnnnnnnnnnnnnnnnnnnnnnnnnnnnnnnnnnnnnnnnnnnnnnnnnnnnnnnnnnnnnnnnnnnnnnnnnnnnnnnnnnnnnnnnnnnnnnnnnnnnnnnnnnnnnnnnnnnnnnnnnnnnnnnnnnnnnnnnnnnnnnnnnnnnnnnnnnnnnnnnnnnnnnnnnnnnnnnnnnnnnnnnnnnnnnnnnnnnnnnnnnnnnnnnnnnnnnnnnnnnnnnnnnnnnnnnnnnnnnnnnnnnnnnnnnnnnnnnnnnnnnnnnnnnnnnnnnnnnnnnnnnnnnnnnnnnnnnnnnnnnnnnnnnnnnnnnnnnnnnnnnnnnnnnnnnnnnnnnnnnnnnnnnnnnnnnnnnnnnnnnnnnnnnnnnnnnnnnnnnnnnnnnnnnnnnnnnnnnnnnnnnnnnnnnnnnnnnnnnnnnnnnnnnnnnnnnnnnnnnnnnnnnnnnnnnnnnnnnnnnnnnnnnnnnnnnnnnnnnnnnnnnnnnnnnnnnnnnnnnnnnnnnnnnnnnnnnnnnnnnnnnnnnnnnnnnnnnnnnnnnnnnnnnnnnnnnnnnnnnnnnnnnnnnnnnnnnnnnnnnnnnnnnnnnnnnnnnnnnnnnnnnnnnnnnnnnnnnnnnnnnnnnnnnnnnnnnnnnnnnnnnnnnnnnnnnnnnnnnnnnnnnnnnnnnnnnnnnnnnnnnnnnnnnnnnnnnnnnnnnnnnnnnnnnnnnnnnnnnnnnnnnnnnnnnnnnnnnnnnnnnnnnnnnnnnnnnnnnnnnnnnnnnnnnnnnnnnnnnnnnnnnnnnnnnnnnnnnnnnnnnnnnnnnnnnnnnnnnnnnnnnnnnnnnnnnnnnnnnnnnnnnnnnnnnnnnnnnnnnnnnnnnnnnnnnnnnnnnnnnnnnnnnnnnnnnnnnnnnnnnnnnnnnnnnnnnnnnnnnnnnnnnnnnnnnnnnnnnnnnnnnnnnnnnnnnnnnnnnnnnnnnnnnnnnnnnnnnnnnnnnnnnnnnnnnnnnnnnnnnnnnnnnnnnnnnnnnnnnnnnnnnnnnnnnnnnnnnnnnnnnnnnnnnnnnnnnnnnnnnnnnnnnnnnnnnnnnnnnnnnnnnnnnnnnnnnnnnnnnnnnnnnnnnnnnnnnnnnnnnnnnnnnnnnnnnnnnnnnnnnnnnnnnnnnnnnnnnnnnnnnnnnnnnnnnnnnnnnnnnnnnnnnnnnnnnnnnnnnnnnnnnnnnnnnnnnnnnnnnnnnnnnnnnnnnnnnnnnnnnnnnnnnnnnnnnnnnnnnnnnnnnnnnnnnnnnnnnnnnnnnnnnnnnnnnnnnnnnnnnnnnnnnnnnnnnnnnnnnnnnnnnnnnnnnnnnnnnnnnnnnnnnnnnnnnnnnnnnnnnnnnnnnnnnnnnnnnnnnnnnnnnnnnnnnnnnnnnnnnnnnnnnnnnnnnnnnnnnnnnnnnnnnnnnnnnnnnnnnnnnnnnnnnnnnnnnnnnnnnnnnnnnnnnnnnnnnnnnnnnnnnnnnnnnnnnnnnnnnnnnnnnnnnnnnnnnnnnnnnnnnnnnnnnnnnnnnnnnnnnnnnnnnnnnnnnnnnnnnnnnnnnnnnnnnnnnnnnnnnnnnnnnnnnnnnnnnnnnnnnnnnnnnnnnnnnnnnnnnnnnnnnnnnnnnnnnnnnnnnnnnnnnnnnnnnnnnnnnnnnnnnnnnnnnnnnnnnnnnnnnnnnnnnnnnnnnnnnnnnnnnnnnnnnnnnnnnnnnnnnnnnnnnnnnnnnnnnnnnnnnnnnnnnnnnnnnnnnnnnnnnnnnnnnnnnnnnnnnnnnnnnnnnnnnnnnnnnnnnnnnnnnnnnnnnnnnnnnnnnnnnnnnnnnnnnnnnnnnnnnnnnnnnnnnnnnnnnnnnnnnnnnnnnnnnnnnnnnnnnnnnnnnnnnnnnnnnnnnnnnnnnnnnnnnnnnnnnnnnnnnnnnnnnnnnnnnnnnnnnnnnnnnnnnnnnnnnnnnnnnnnnnnnnnnnnnnnnnnnnnnnnnnnnnnnnnnnnnnnnnnnnnnnnnnnnnnnnnnnnnnnnnnnnnnnnnnnnnnnnnnnnnnnnnnnnnnnnnnnnnnnnnnnnnnnnnnnnnnnnnnnnnnnnnnnnnnnnnnnnnnnnnnnnnnnnnnnnnnnnnnnnnnnnnnnnnnnnnnnnnnnnnnnnnnnnnnnnnnnnnnnnnnnnnnnnnnnnnnnnnnnnnnnnnnnnnnnnnnnnnnnnnnnnnnnnnnnnnnnnnnnnnnnnnnnnnnnnnnnnnnnnnnnnnnnnnnnnnnnnnnnnnnnnnnnnnnnnnnnnnnnnnnnnnnnnnnnnnnnnnnnnnnnnnnnnnnnnnnnnnnnnnnnnnnnnnnnnnnnnnnnnnnnnnnnnnnnnnnnnnnnnnnnnnnnnnnnnnnnnnnnnnnnnnnnnnnnnnnnnnnnnnnnnnnnnnnnnnnnnnnnnnnnnnnnnnnnnnnnnnnnnnnnnnnnnnnnnnnnnnnnnnnnnnnnnnnnnnnnnnnnnnnnnnnnnnnnnnnnnnnnnnnnnnnnnnnnnnnnnnnnnnnnnnnnnnnnnnnnnnnnnnnnnnnnnnnnnnnnnnnnnnnnnnnnnnnnnnnnnnnnnnnnnnnnnnnnnnnnnnnnnnnnnnnnnnnnnnnnnnnnnnnnnnnnnnnnnnnnnnnnnnnnnnnnnnnnnnnnnnnnnnnnnnnnnnnnnnnnnnnnnnnnnnnnnnnnnnnnnnnnnnnnnnnnnnnnnnnnnnnnnnnnnnnnnnnnnnnnnnnnnnnnnnnnnnnnnnnnnnnnnnnnnnnnnnnnnnnnnnnnnnnnnnnnnnnnnnnnnnnnnnnnnnnnnnnnnnnnnnnnnnnnnnnnnnnnnnnnnnnnnnnnnnnnnnnnnnnnnnnnnnnnnnnnnnnnnnnnnnnnnnnnnnnnnnnnnnnnnnnnnnnnnnnnnnnnnnnnnnnnnnnnnnnnnnnnnnnnnnnnnnnnnnnnnnnnnnnnnnnnnnnnnnnnnnnnnnnnnnnnnnnnnnnnnnnnnnnnnnnnnnnnnnnnnnnnnnnnnnnnnnnnnnnnnnnnnnnnnnnnnnnnnnnnnnnnnnnnnnnnnnnnnnnnnnnnnnnnnnnnnnnnnnnnnnnnnnnnnnnnnnnnnnnnnnnnnnnnnnnnnnnnnnnnnnnnnnnnnnnnnnnnnnnnnnnnnnnnnnnnnnnnnnnnnnnnnnnnnnnnnnnnnnnnnnnnnnnnnnnnnnnnnnnnnnnnnnnnnnnnnnnnnnnnnnnnnnnnnnnnnnnnnnnnnnnnnnnnnnnnnnnnnnnnnnnnnnnnnnnnnnnnnnnnnnnnnnnnnnnnnnnnnnnnnnnnnnnnnnnnnnnnnnnnnnnnnnnnnnnnnnnnnnnnnnnnnnnnnnnnnnnnnnnnnnnnnnnnnnnnnnnnnnnnnnnnnnnnnnnnnnnnnnnnnnnnnnnnnnnnnnnnnnnnnnnnnnnnnnnnnnnnnnnnnnnnnnnnnnnnnnnnnnnnnnnnnnnnnnnnnnnnnnnnnnnnnnnnnnnnnnnnnnnnnnnnnnnnnnnnnnnnnnnnnnnnnnnnnnnnnnnnnnnnnnnnnnnnnnnnnnnnnnnnnnnnnnnnnnnnnnnnnnnnnnnnnnnnnnnnnnnnnnnnnnnnnnnnnnnnnnnnnnnnnnnnnnnnnnnnnnnnnnnnnnnnnnnnnnnnnnnnnnnnnnnnnnnnnnnnnnnnnnnnnnnnnnnnnnnnnnnnnnnnnnnnnnnnnnnnnnnnnnnnnnnnnnnnnnnnnnnnnnnnnnnnnnnnnnnnnnnnnnnnnnnnnnnnnnnnnnnnnnnnnnnnnnnnnnnnnnnnnnnnnnnnnnnnnnnnnnnnnnnnnnnnnnnnnnnnnnnnnnnnnnnnnnnnnnnnnnnnnnnnnnnnnnnnnnnnnnnnnnnnnnnnnnnnnnnnnnnnnnnnnnnnnnnnnnnnnnnnnnnnnnnnnnnnnnnnnnnnnnnnnnnnnnnnnnnnnnnnnnnnnnnnnnnnnnnnnnnnnnnnnnnnnnnnnnnnnnnnnnnnnnnnnnnnnnnnnnnnnnnnnnnnnnnnnnnnnnnnnnnnnnnnnnnnnnnnnnnnnnnnnnnnnnnnnnnnnnnnnnnnnnnnnnnnnnnnnnnnnnnnnnnnnnnnnnnnnnnnnnnnnnnnnnnnnnnnnnnnnnnnnnnnnnnnnnnnnnnnnnnnnnnnnnnnnnnnnnnnnnnnnnnnnnnnnnnnnnnnnnnnnnnnnnnnnnnnnnnnnnnnnnnnnnnnnnnnnnnnnnnnnnnnnnnnnnnnnnnnnnnnnnnnnnnnnnnnnnnnnnnnnnnnnnnnnnnnnnnnnnnnnnnnnnnnnnnnnnnnnnnnnnnnnnnnnnnnnnnnnnnnnnnnnnnnnnnnnnnnnnnnnnnnnnnnnnnnnnnnnnnnnnnnnnnnnnnnnnnnnnnnnnnnnnnnnnnnnnnnnnnnnnnnnnnnnnnnnnnnnnnnnnnnnnnnnnnnnnnnnnnnnnnnnnnnnnnnnnnnnnnnnnnnnnnnnnnnnnnnnnnnnnnnnnnnnnnnnnnnnnnnnnnnnnnnnnnnnnnnnnnnnnnnnnnnnnnnnnnnnnnnnnnnnnnnnnnnnnnnnnnnnnnnnnnnnnnnnnnnnnnnnnnnnnnnnnnnnnnnnnnnnnnnnnnnnnnnnnnnnnnnnnnnnnnnnnnnnnnnnnnnnnnnnnnnnnnnnnnnnnnnnnnnnnnnnnnnnnnnnnnnnnnnnnnnnnnnnnnnnnnnnnnnnnnnnnnnnnnnnnnnnnnnnnnnnnnnnnnnnnnnnnnnnnnnnnnnnnnnnnnnnnnnnnnnnnnnnnnnnnnnnnnnnnnnnnnnnnnnnnnnnnnnnnnnnnnnnnnnnnnnnnnnnnnnnnnnnnnnnnnnnnnnnnnnnnnnnnnnnnnnnnnnnnnnnnnnnnnnnnnnnnnnnnnnnnnnnnnnnnnnnnnnnnnnnnnnnnnnnnnnnnnnnnnnnnnnnnnnnnnnnnnnnnnnnnnnnnnnnnnnnnnnnnnnnnnnnnnnnnnnnnnnnnnnnnnnnnnnnnnnnnnnnnnnnnnnnnnnnnnnnnnnnnnnnnnnnnnnnnnnnnnnnnnnnnnnnnnnnnnnnnnnnnnnnnnnnnnnnnnnnnnnnnnnnnnnnnnnnnnnnnnnnnnnnnnnnnnnnnnnnnnnnnnnnnnnnnnnnnnnnnnnnnnnnnnnnnnnnnnnnnnnnnnnnnnnnnnnnnnnnnnnnnnnnnnnnnnnnnnnnnnnnnnnnnnnnnnnnnnnnnnnnnnnnnnnnnnnnnnnnnnnnnnnnnnnnnnnnnnnnnnnnnnnnnnnnnnnnnnnnnnnnnnnnnnnnnnnnnnnnnnnnnnnnnnnnnnnnnnnnnnnnnnnnnnnnnnnnnnnnnnnnnnnnnnnnnnnnnnnnnnnnnnnnnnnnnnnnnnnnnnnnnnnnnnnnnnnnnnnnnnnnnnnnnnnnnnnnnnnnnnnnnnnnnnnnnnnnnnnnnnnnnnnnnnnnnnnnnnnnnnnnnnnnnnnnnnnnnnnnnnnnnnnnnnnnnnnnnnnnnnnnnnnnnnnnnnnnnnnnnnnnnnnnnnnnnnnnnnnnnnnnnnnnnnnnnnnnnnnnnnnnnnnnnnnnnnnnnnnnnnnnnnnnnnnnnnnnnnnnnnnnnnnnnnnnnnnnnnnnnnnnnnnnnnnnnnnnnnnnnnnnnnnnnnnnnnnnnnnnnnnnnnnnnnnnnnnnnnnnnnnnnnnnnnnnnnnnnnnnnnnnnnnnnnnnnnnnnnnnnnnnnnnnnnnnnnnnnnnnnnnnnnnnnnnnnnnnnnnnnnnnnnnnnnnnnnnnnnnnnnnnnnnnnnnnnnnnnnnnnnnnnnnnnnnnnnnnnnnnnnnnnnnnnnnnnnnnnnnnnnnnnnnnnnnnnnnnnnnnnnnnnnnnnnnnnnnnnnnnnnnnnnnnnnnnnnnnnnnnnnnnnnnnnnnnnnnnnnnnnnnnnnnnnnnnnnnnnnnnnnnnnnnnnnnnnnnnnnnnnnnnnnnnnnnnnnnnnnnnnnnnnnnnnnnnnnnnnnnnnnnnnnnnnnnnnnnnnnnnnnnnnnnnnnnnnnnnnnnnnnnnnnnnnnnnnnnnnnnnnnnnnnnnnnnnnnnnnnnnnnnnnnnnnnnnnnnnnnnnnnnnnnnnnnnnnnnnnnnnnnnnnnnnnnnnnnnnnnnnnnnnnnnnnnnnnnnnnnnnnnnnnnnnnnnnnnnnnnnnnnnnnnnnnnnnnnnnnnnnnnnnnnnnnnnnnnnnnnnnnnnnnnnnnnnnnnnnnnnnnnnnnnnnnnnnnnnnnnnnnnnnnnnnnnnnnnnnnnnnnnnnnnnnnnnnnnnnnnnnnnnnnnnnnnnnnnnnnnnnnnnnnnnnnnnnnnnnnnnnnnnnnnnnnnnnnnnnnnnnnnnnnnnnnnnnnnnnnnnnnnnnnnnnnnnnnnnnnnnnnnnnnnnnnnnnnnnnnnnnnnnnnnnnnnnnnnnnnnnnnnnnnnnnnnnnnnnnnnnnnnnnnnnnnnnnnnnnnnnnnnnnnnnnnnnnnnnnnnnnnnnnnnnnnnnnnnnnnnnnnnnnnnnnnnnnnnnnnnnnnnnnnnnnnnnnnnnnnnnnnnnnnnnnnnnnnnnnnnnnnnnnnnnnnnnnnnnnnnnnnnnnnnnnnnnnnnnnnnnnnnnnnnnnnnnnnnnnnnnnnnnnnnnnnnnnnnnnnnnnnnnnnnnnnnnnnnnnnnnnnnnnnnnnnnnnnnnnnnnnnnnnnnnnnnnnnnnnnnnnnnnnnnnnnnnnnnnnnnnnnnnnnnnnnnnnnnnnnnnnnnnnnnnnnnnnnnnnnnnnnnnnnnnnnnnnnnnnnnnnnnnnnnnnnnnnnnnnnnnnnnnnnnnnnnnnnnnnnnnnnnnnnnnnnnnnnnnnnnnnnnnnnnnnnnnnnnnnnnnnnnnnnnnnnnnnnnnnnnnnnnnnnnnnnnnnnnnnnnnnnnnnnnnnnnnnnnnnnnnnnnnnnnnnnnnnnnnnnnnnnnnnnnnnnnnnnnnnnnnnnnnnnnnnnnnnnnnnnnnnnnnnnnnnnnnnnnnnnnnnnnnnnnnnnnnnnnnnnnnnnnnnnnnnnnnnnnnnnnnnnnnnnnnnnnnnnnnnnnnnnnnnnnnnnnnnnnnnnnnnnnnnnnnnnnnnnnnnnnnnnnnnnnnnnnnnnnnnnnnnnnnnnnnnnnnnnnnnnnnnnnnnnnnnnnnnnnnnnnnnnnnnnnnnnnnnnnnnnnnnnnnnnnnnnnnnnnnnnnnnnnnnnnnnnnnnnnnnnnnnnnnnnnnnnnnnnnnnnnnnnnnnnnnnnnnnnnnnnnnnnnnnnnnnnnnnnnnnnnnnnnnnnnnnnnnnnnnnnnnnnnnnnnnnnnnnnnnnnnnnnnnnnnnnnnnnnnnnnnnnnnnnnnnnnnnnnnnnnnnnnnnnnnnnnnnnnnnnnnnnnnnnnnnnnnnnnnnnnnnnnnnnnnnnnnnnnnnnnnnnnnnnnnnnnnnnnnnnnnnnnnnnnnnnnnnnnnnnnnnnnnnnnnnnnnnnnnnnnnnnnnnnnnnnnnnnnnnnnnnnnnnnnnnnnnnnnnnnnnnnnnnnnnnnnnnnnnnnnnnnnnnnnnnnnnnnnnnnnnnnnnnnnnnnnnnnnnnnnnnnnnnnnnnnnnnnnnnnnnnnnnnnnnnnnnnnnnnnnnnnnnnnnnnnnnnnnnnnnnnnnnnnnnnnnnnnnnnnnnnnnnnnnnnnnnnnnnnnnnnnnnnnnnnnnnnnnnnnnnnnnnnnnnnnnnnnnnnnnnnnnnnnnnnnnnnnnnnnnnnnnnnnnnnnnnnnnnnnnnnnnnnnnnnnnnnnnnnnnnnnnnnnnnnnnnnnnnnnnnnnnnnnnnnnnnnnnnnnnnnnnnnnnnnnnnnnnnnnnnnnnnnnnnnnnnnnnnnnnnnnnnnnnnnnnnnnnnnnnnnnnnnnnnnnnnnnnnnnnnnnnnnnnnnnnnnnnnnnnnnnnnnnnnnnnnnnnnnnnnnnnnnnnnnnnnnnnnnnnnnnnnnnnnnnnnnnnnnnnnnnnnnnnnnnnnnnnnnnnnnnnnnnnnnnnnnnnnnnnnnnnnnnnnnnnnnnnnnnnnnnnnnnnnnnnnnnnnnnnnnnnnnnnnnnnnnnnnnnnnnnnnnnnnnnnnnnnnnnnnnnnnnnnnnnnnnnnnnnnnnnnnnnnnnnnnnnnnnnnnnnnnnnnnnnnnnnnnnnnnnnnnnnnnnnnnnnnnnnnnnnnnnnnnnnnnnnnnnnnnnnnnnnnnnnnnnnnnnnnnnnnnnnnnnnnnnnnnnnnnnnnnnnnnnnnnnnnnnnnnnnnnnnnnnnnnnnnnnnnnnnnnnnnnnnnnnnnnnnnnnnnnnnnnnnnnnnnnnnnnnnnnnnnnnnnnnnnnnnnnnnnnnnnnnnnnnnnnnnnnnnnnnnnnnnnnnnnnnnnnnnnnnnnnnnnnnnnnnnnnnnnnnnnnnnnnnnnnnnnnnnnnnnnnnnnnnnnnnnnnnnnnnnnnnnnnnnnnnnnnnnnnnnnnnnnnnnnnnnnnnnnnnnnnnnnnnnnnnnnnnnnnnnnnnnnnnnnnnnnnnnnnnnnnnnnnnnnnnnnnnnnnnnnnnnnnnnnnnnnnnnnnnnnnnnnnnnnnnnnnnnnnnnnnnnnnnnnnnnnnnnnnnnnnnnnnnnnnnnnnnnnnnnnnnnnnnnnnnnnnnnnnnnnnnnnnnnnnnnnnnnnnnnnnnnnnnnnnnnnnnnnnnnnnnnnnnnnnnnnnnnnnnnnnnnnnnnnnnnnnnnnnnnnnnnnnnnnnnnnnnnnnnnnnnnnnnnnnnnnnnnnnnnnnnnnnnnnnnnnnnnnnnnnnnnnnnnnnnnnnnnnnnnnnnnnnnnnnnnnnnnnnnnnnnnnnnnnnnnnnnnnnnnnnnnnnnnnnnnnnnnnnnnnnnnnnnnnnnnnnnnnnnnnnnnnnnnnnnnnnnnnnnnnnnnnnnnnnnnnnnnnnnnnnnnnnnnnnnnnnnnnnnnnnnnnnnnnnnnnnnnnnnnnnnnnnnnnnnnnnnnnnnnnnnnnnnnnnnnnnnnnnnnnnnnnnnnnnnnnnnnnnnnnnnnnnnnnnnnnnnnnnnnnnnnnnnnnnnnnnnnnnnnnnnnnnnnnnnnnnnnnnnnnnnnnnnnnnnnnnnnnnnnnnnnnnnnnnnnnnnnnnnnnnnnnnnnnnnnnnnnnnnnnnnnnnnnnnnnnnnnnnnnnnnnnnnnnnnnnnnnnnnnnnnnnnnnnnnnnnnnnnnnnnnnnnnnnnnnnnnnnnnnnnnnnnnnnnnnnnnnnnnnnnnnnnnnnnnnnnnnnnnnnnnnnnnnnnnnnnnnnnnnnnnnnnnnnnnnnnnnnnnnnnnnnnnnnnnnnnnnnnnnnnnnnnnnnnnnnnnnnnnnnnnnnnnnnnnnnnnnnnnnnnnnnnnnnnnnnnnnnnnnnnnnnnnnnnnnnnnnnnnnnnnnnnnnnnnnnnnnnnnnnnnnnnnnnnnnnnnnnnnnnnnnnnnnnnnnnnnnnnnnnnnnnnnnnnnnnnnnnnnnnnnnnnnnnnnnnnnnnnnnnnnnnnnnnnnnnnnnnnnnnnnnnnnnnnnnnnnnnnnnnnnnnnnnnnnnnnnnnnnnnnnnnnnnnnnnnnnnnnnnnnnnnnnnnnnnnnnnnnnnnnnnnnnnnnnnnnnnnnnnnnnnnnnnnnnnnnnnnnnnnnnnnnnnnnnnnnnnnnnnnnnnnnnnnnnnnnnnnnnnnnnnnnnnnnnnnnnnnnnnnnnnnnnnnnnnnnnnnnnnnnnnnnnnnnnnnnnnnnnnnnnnnnnnnnnnnnnnnnnnnnnnnnnnnnnnnnnnnnnnnnnnnnnnnnnnnnnnnnnnnnnnnnnnnnnnnnnnnnnnnnnnnnnnnnnnnnnnnnnnnnnnnnnnnnnnnnnnnnnnnnnnnnnnnnnnnnnnnnnnnnnnnnnnnnnnnnnnnnnnnnnnnnnnnnnnnnnnnnnnnnnnnnnnnnnnnnnnnnnnnnnnnnnnnnnnnnnnnnnnnnnnnnnnnnnnnnnnnnnnnnnnnnnnnnnnnnnnnnnnnnnnnnnnnnnnnnnnnnnnnnnnnnnnnnnnnnnnnnnnnnnnnnnnnnnnnnnnnnnnnnnnnnnnnnnnnnnnnnnnnnnnnnnnnnnnnnnnnnnnnnnnnnnnnnnnnnnnnnnnnnnnnnnnnnnnnnnnnnnnnnnnnnnnnnnnnnnnnnnnnnnnnnnnnnnnnnnnnnnnnnnnnnnnnnnnnnnnnnnnnnnnnnnnnnnnnnnnnnnnnnnnnnnnnnnnnnnnnnnnnnnnnnnnnnnnnnnnnnnnnnnnnnnnnnnnnnnnnnnnnnnnnnnnnnnnnnnnnnnnnnnnnnnnnnnnnnnnnnnnnnnnnnnnnnnnnnnnnnnnnnnnnnnnnnnnnnnnnnnnnnnnnnnnnnnnnnnnnnnnnnnnnnnnnnnnnnnnnnnnnnnnnnnnnnnnnnnnnnnnnnnnnnnnnnnnnnnnnnnnnnnnnnnnnnnnnnnnnnnnnnnnnnnnnnnnnnnnnnnnnnnnnnnnnnnnnnnnnnnnnnnnnnnnnnnnnnnnnnnnnnnnnnnnnnnnnnnnnnnnnnnnnnnnnnnnnnnnnnnnnnnnnnnnnnnnnnnnnnnnnnnnnnnnnnnnnnnnnnnnnnnnnnnnnnnnnnnnnnnnnnnnnnnnnnnnnnnnnnnnnnnnnnnnnnnnnnnnnnnnnnnnnnnnnnnnnnnnnnnnnnnnnnnnnnnnnnnnnnnnnnnnnnnnnnnnnnnnnnnnnnnnnnnnnnnnnnnnnnnnnnnnnnnnnnnnnnnnnnnnnnnnnnnnnnnnnnnnnnnnnnnnnnnnnnnnnnnnnnnnnnnnnnnnnnnnnnnnnnnnnnnnnnnnnnnnnnnnnnnnnnnnnnnnnnnnnnnnnnnnnnnnnnnnnnnnnnnnnnnnnnnnnnnnnnnnnnnnnnnnnnnnnnnnnnnnnnnnnnnnnnnnnnnnnnnnnnnnnnnnnnnnnnnnnnnnnnnnnnnnnnnnnnnnnnnnnnnnnnnnnnnnnnnnnnnnnnnnnnnnnnnnnnnnnnnnnnnnnnnnnnnnnnnnnnnnnnnnnnnnnnnnnnnnnnnnnnnnnnnnnnnnnnnnnnnnnnnnnnnnnnnnnnnnnnnnnnnnnnnnnnnnnnnnnnnnnnnnnnnnnnnnnnnnnnnnnnnnnnnnnnnnnnnnnnnnnnnnnnnnnnnnnnnnnnnnnnnnnnnnnnnnnnnnnnnnnnnnnnnnnnnnnnnnnnnnnnnnnnnnnnnnnnnnnnnnnnnnnnnnnnnnnnnnnnnnnnnnnnnnnnnnnnnnnnnnnnnnnnnnnnnnnnnnnnnnnnnnnnnnnnnnnnnnnnnnnnnnnnnnnnnnnnnnnnnnnnnnnnnnnnnnnnnnnnnnnnnnnnnnnnnnnnnnnnnnnnnnnnnnnnnnnnnnnnnnnnnnnnnnnnnnnnnnnnnnnnnnnnnnnnnnnnnnnnnnnnnnnnnnnnnnnnnnnnnnnnnnnnnnnnnnnnnnnnnnnnnnnnnnnnnnnnnnnnnnnnnnnnnnnnnnnnnnnnnnnnnnnnnnnnnnnnnnnnnnnnnnnnnnnnnnnnnnnnnnnnnnnnnnnnnnnnnnnnnnnnnnnnnnnnnnnnnnnnnnnnnnnnnnnnnnnnnnnnnnnnnnnnnnnnnnnnnnnnnnnnnnnnnnnnnnnnnnnnnnnnnnnnnnnnnnnnnnnnnnnnnnnnnnnnnnnnnnnnnnnnnnnnnnnnnnnnnnnnnnnnnnnnnnnnnnnnnnnnnnnnnnnnnnnnnnnnnnnnnnnnnnnnnnnnnnnnnnnnnnnnnnnnnnnnnnnnnnnnnnnnnnnnnnnnnnnnnnnnnnnnnnnnnnnnnnnnnnnnnnnnnnnnnnnnnnnnnnnnnnnnnnnnnnnnnnnnnnnnnnnnnnnnnnnnnnnnnnnnnnnnnnnnnnnnnnnnnnnnnnnnnnnnnnnnnnnnnnnnnnnnnnnnnnnnnnnnnnnnnnnnnnnnnnnnnnnnnnnnnnnnnnnnnnnnnnnnnnnnnnnnnnnnnnnnnnnnnnnnnnnnnnnnnnnnnnnnnnnnnnnnnnnnnnnnnnnnnnnnnnnnnnnnnnnnnnnnnnnnnnnnnnnnnnnnnnnnnnnnnnnnnnnnnnnnnnnnnnnnnnnnnnnnnnnnnnnnnnnnnnnnnnnnnnnnnnnnnnnnnnnnnnnnnnnnnnnnnnnnnnnnnnnnnnnnnnnnnnnnnnnnnnnnnnnnnnnnnnnnnnnnnnnnnnnnnnnnnnnnnnnnnnnnnnnnnnnnnnnnnnnnnnnnnnnnnnnnnnnnnnnnnnnnnnnnnnnnnnnnnnnnnnnnnnnnnnnnnnnnnnnnnnnnnnnnnnnnnnnnnnnnnnnnnnnnnnnnnnnnnnnnnnnnnnnnnnnnnnnnnnnnnnnnnnnnnnnnnnnnnnnnnnnnnnnnnnnnnnnnnnnnnnnnnnnnnnnnnnnnnnnnnnnnnnnnnnnnnnnnnnnnnnnnnnnnnnnnnnnnnnnnnnnnnnnnnnnnnnnnnnnnnnnnnnnnnnnnnnnnnnnnnnnnnnnnnnnnnnnnnnnnnnnnnnnnnnnnnnnnnnnnnnnnnnnnnnnnnnnnnnnnnnnnnnnnnnnnnnnnnnnnnnnnnnnnnnnnnnnnnnnnnnnnnnnnnnnnnnnnnnnnnnnnnnnnnnnnnnnnnnnnnnnnnnnnnnnnnnnnnnnnnnnnnnnnnnnnnnnnnnnnnnnnnnnnnnnnnnnnnnnnnnnnnnnnnnnnnnnnnnnnnnnnnnnnnnnnnnnnnnnnnnnnnnnnnnnnnnnnnnnnnnnnnnnnnnnnnnnnnnnnnnnnnnnnnnnnnnnnnnnnnnnnnnnnnnnnnnnnnnnnnnnnnnnnnnnnnnnnnnnnnnnnnnnnnnnnnnnnnnnnnnnnnnnnnnnnnnnnnnnnnnnnnnnnnnnnnnnnnnnnnnnnnnnnnnnnnnnnnnnnnnnnnnnnnnnnnnnnnnnnnnnnnnnnnnnnnnnnnnnnnnnnnnnnnnnnnnnnnnnnnnnnnnnnnnnnnnnnnnnnnnnnnnnnnnnnnnnnnnnnnnnnnnnnnnnnnnnnnnnnnnnnnnnnnnnnnnnnnnnnnnnnnnnnnnnnnnnnnnnnnnnnnnnnnnnnnnnnnnnnnnnnnnnnnnnnnnnnnnnnnnnnnnnnnnnnnnnnnnnnnnnnnnnnnnnnnnnnnnnnnnnnnnnnnnnnnnnnnnnnnnnnnnnnnnnnnnnnnnnnnnnnnnnnnnnnnnnnnnnnnnnnnnnnnnnnnnnnnnnnnnnnnnnnnnnnnnnnnnnnnnnnnnnnnnnnnnnnnnnnnnnnnnnnnnnnnnnnnnnnnnnnnnnnnnnnnnnnnnnnnnnnnnnnnnnnnnnnnnnnnnnnnnnnnnnnnnnnnnnnnnnnnnnnnnnnnnnnnnnnnnnnnnnnnnnnnnnnnnnnnnnnnnnnnnnnnnnnnnnnnnnnnnnnnnnnnnnnnnnnnnnnnnnnnnnnnnnnnnnnnnnnnnnnnnnnnnnnnnnnnnnnnnnnnnnnnnnnnnnnnnnnnnnnnnnnnnnnnnnnnnnnnnnnnnnnnnnnnnnnnnnnnnnnnnnnnnnnnnnnnnnnnnnnnnnnnnnnnnnnnnnnnnnnnnnnnnnnnnnnnnnnnnnnnnnnnnnnnnnnnnnnnnnnnnnnnnnnnnnnnnnnnnnnnnnnnnnnnnnnnnnnnnnnnnnnnnnnnnnnnnnnnnnnnnnnnnnnnnnnnnnnnnnnnnnnnnnnnnnnnnnnnnnnnnnnnnnnnnnnnnnnnnnnnnnnnnnnnnnnnnnnnnnnnnnnnnnnnnnnnnnnnnnnnnnnnnnnnnnnnnnnnnnnnnnnnnnnnnnnnnnnnnnnnnnnnnnnnnnnnnnnnnnnnnnnnnnnnnnnnnnnnnnnnnnnnnnnnnnnnnnnnnnnnnnnnnnnnnnnnnnnnnnnnnnnnnnnnnnnnnnnnnnnnnnnnnnnnnnnnnnnnnnnnnnnnnnnnnnnnnnnnnnnnnnnnnnnnnnnnnnnnnnnnnnnnnnnnnnnnnnnnnnnnnnnnnnnnnnnnnnnnnnnnnnnnnnnnnnnnnnnnnnnnnnnnnnnnnnnnnnnnnnnnnnnnnnnnnnnnnnnnnnnnnnnnnnnnnnnnnnnnnnnnnnnnnnnnnnnnnnnnnnnnnnnnnnnnnnnnnnnnnnnnnnnnnnnnnnnnnnnnnnnnnnnnnnnnnnnnnnnnnnnnnnnnnnnnnnnnnnnnnnnnnnnnnnnnnnnnnnnnnnnnnnnnnnnnnnnnnnnnnnnnnnnnnnnnnnnnnnnnnnnnnnnnnnnnnnnnnnnnnnnnnnnnnnnnnnnnnnnnnnnnnnnnnnnnnnnnnnnnnnnnnnnnnnnnnnnnnnnnnnnnnnnnnnnnnnnnnnnnnnnnnnnnnnnnnnnnnnnnnnnnnnnnnnnnnnnnnnnnnnnnnnnnnnnnnnnnnnnnnnnnnnnnnnnnnnnnnnnnnnnnnnnnnnnnnnnnnnnnnnnnnnnnnnnnnnnnnnnnnnnnnnnnnnnnnnnnnnnnnnnnnnnnnnnnnnnnnnnnnnnnnnnnnnnnnnnnnnnnnnnnnnnnnnnnnnnnnnnnnnnnnnnnnnnnnnnnnnnnnnnnnnnnnnnnnnnnnnnnnnnnnnnnnnnnnnnnnnnnnnnnnnnnnnnnnnnnnnnnnnnnnnnnnnnnnnnnnnnnnnnnnnnnnnnnnnnnnnnnnnnnnnnnnnnnnnnnnnnnnnnnnnnnnnnnnnnnnnnnnnnnnnnnnnnnnnnnnnnnnnnnnnnnnnnnnnnnnnnnnnnnnnnnnnnnnnnnnnnnnnnnnnnnnnnnnnnnnnnnnnnnnnnnnnnnnnnnnnnnnnnnnnnnnnnnnnnnnnnnnnnnnnnnnnnnnnnnnnnnnnnnnnnnnnnnnnnnnnnnnnnnnnnnnnnnnnnnnnnnnnnnnnnnnnnnnnnnnnnnnnnnnnnnnnnnnnnnnnnnnnnnnnnnnnnnnnnnnnnnnnnnnnnnnnnnnnnnnnnnnnnnnnnnnnnnnnnnnnnnnnnnnnnnnnnnnnnnnnnnnnnnnnnnnnnnnnnnnnnnnnnnnnnnnnnnnnnnnnnnnnnnnnnnnnnnnnnnnnnnnnnnnnnnnnnnnnnnnnnnnnnnnnnnnnnnnnnnnnnnnnnnnnnnnnnnnnnnnnnnnnnnnnnnnnnnnnnnnnnnnnnnnnnnnnnnnnnnnnnnnnnnnnnnnnnnnnnnnnnnnnnnnnnnnnnnnnnnnnnnnnnnnnnnnnnnnnnnnnnnnnnnnnnnnnnnnnnnnnnnnnnnnnnnnnnnnnnnnnnnnnnnnnnnnnnnnnnnnnnnnnnnnnnnnnnnnnnnnnnnnnnnnnnnnnnnnnnnnnnnnnnnnnnnnnnnnnnnnnnnnnnnnnnnnnnnnnnnnnnnnnnnnnnnnnnnnnnnnnnnnnnnnnnnnnnnnnnnnnnnnnnnnnnnnnnnnnnnnnnnnnnnnnnnnnnnnnnnnnnnnnnnnnnnnnnnnnnnnnnnnnnnnnnnnnnnnnnnnnnnnnnnnnnnnnnnnnnnnnnnnnnnnnnnnnnnnnnnnnnnnnnnnnnnnnnnnnnnnnnnnnnnnnnnnnnnnnnnnnnnnnnnnnnnnnnnnnnnnnnnnnnnnnnnnnnnnnnnnnnnnnnnnnnnnnnnnnnnnnnnnnnnnnnnnnnnnnnnnnnnnnnnnnnnnnnnnnnnnnnnnnnnnnnnnnnnnnnnnnnnnnnnnnnnnnnnnnnnnnnnnnnnnnnnnnnnnnnnnnnnnnnnnnnnnnnnnnnnnnnnnnnnnnnnnnnnnnnnnnnnnnnnnnnnnnnnnnnnnnnnnnnnnnnnnnnnnnnnnnnnnnnnnnnnnnnnnnnnnnnnnnnnnnnnnnnnnnnnnnnnnnnnnnnnnnnnnnnnnnnnnnnnnnnnnnnnnnnnnnnnnnnnnnnnnnnnnnnnnnnnnnnnnnnnnnnnnnnnnnnnnnnnnnnnnnnnnnnnnnnnnnnnnnnnnnnnnnnnnnnnnnnnnnnnnnnnnnnnnnnnnnnnnnnnnnnnnnnnnnnnnnnnnnnnnnnnnnnnnnnnnnnnnnnnnnnnnnnnnnnnnnnnnnnnnnnnnnnnnnnnnnnnnnnnnnnnnnnnnnnnnnnnnnnnnnnnnnnnnnnnnnnnnnnnnnnnnnnnnnnnnnnnnnnnnnnnnnnnnnnnnnnnnnnnnnnnnnnnnnnnnnnnnnnnnnnnnnnnnnnnnnnnnnnnnnnnnnnnnnnnnnnnnnnnnnnnnnnnnnnnnnnnnnnnnnnnnnnnnnnnnnnnnnnnnnnnnnnnnnnnnnnnnnnnnnnnnnnnnnnnnnnnnnnnnnnnnnnnnnnnnnnnnnnnnnnnnnnnnnnnnnnnnnnnnnnnnnnnnnnnnnnnnnnnnnnnnnnnnnnnnnnnnnnnnnnnnnnnnnnnnnnnnnnnnnnnnnnnnnnnnnnnnnnnnnnnnnnnnnnnnnnnnnnnnnnnnnnnnnnnnnnnnnnnnnnnnnnnnnnnnnnnnnnnnnnnnnnnnnnnnnnnnnnnnnnnnnnnnnnnnnnnnnnnnnnnnnnnnnnnnnnnnnnnnnnnnnnnnnnnnnnnnnnnnnnnnnnnnnnnnnnnnnnnnnnnnnnnnnnnnnnnnnnnnnnnnnnnnnnnnnnnnnnnnnnnnnnnnnnnnnnnnnnnnnnnnnnnnnnnnnnnnnnnnnnnnnnnnnnnnnnnnnnnnnnnnnnnnnnnnnnnnnnnnnnnnnnnnnnnnnnnnnnnnnnnnnnnnnnnnnnnnnnnnnnnnnnnnnnnnnnnnnnnnnnnnnnnnnnnnnnnnnnnnnnnnnnnnnnnnnnnnnnnnnnnnnnnnnnnnnnnnnnnnnnnnnnnnnnnnnnnnnnnnnnnnnnnnnnnnnnnnnnnnnnnnnnnnnnnnnnnnnnnnnnnnnnnnnnnnnnnnnnnnnnnnnnnnnnnnnnnnnnnnnnnnnnnnnnnnnnnnnnnnnnnnnnnnnnnnnnnnnnnnnnnnnnnnnnnnnnnnnnnnnnnnnnnnnnnnnnnnnnnnnnnnnnnnnnnnnnnnnnnnnnnnnnnnnnnnnnnnnnnnnnnnnnnnnnnnnnnnnnnnnnnnnnnnnnnnnnnnnnnnnnnnnnnnnnnnnnnnnnnnnnnnnnnnnnnnnnnnnnnnnnnnnnnnnnnnnnnnnnnnnnnnnnnnnnnnnnnnnnnnnnnnnnnnnnnnnnnnnnnnnnnnnnnnnnnnnnnnnnnnnnnnnnnnnnnnnnnnnnnnnnnnnnnnnnnnnnnnnnnnnnnnnnnnnnnnnnnnnnnnnnnnnnnnnnnnnnnnnnnnnnnnnnnnnnnnnnnnnnnnnnnnnnnnnnnnnnnnnnnnnnnnnnnnnnnnnnnnnnnnnnnnnnnnnnnnnnnnnnnnnnnnnnnnnnnnnnnnnnnnnnnnnnnnnnnnnnnnnnnnnnnnnnnnnnnnnnnnnnnnnnnnnnnnnnnnnnnnnnnnnnnnnnnnnnnnnnnnnnnnnnnnnnnnnnnnnnnnnnnnnnnnnnnnnnnnnnnnnnnnnnnnnnnnnnnnnnnnnnnnnnnnnnnnnnnnnnnnnnnnnnnnnnnnnnnnnnnnnnnnnnnnnnnnnnnnnnnnnnnnnnnnnnnnnnnnnnnnnnnnnnnnnnnnnnnnnnnnnnnnnnnnnnnnnnnnnnnnnnnnnnnnnnnnnnnnnnnnnnnnnnnnnnnnnnnnnnnnnnnnnnnnnnnnnnnnnnnnnnnnnnnnnnnnnnnnnnnnnnnnnnnnnnnnnnnnnnnnnnnnnnnnnnnnnnnnnnnnnnnnnnnnnnnnnnnnnnnnnnnnnnnnnnnnnnnnnnnnnnnnnnnnnnnnnnnnnnnnnnnnnnnnnnnnnnnnnnnnnnnnnnnnnnnnnnnnnnnnnnnnnnnnnnnnnnnnnnnnnnnnnnnnnnnnnnnnnnnnnnnnnnnnnnnnnnnnnnnnnnnnnnnnnnnnnnnnnnnnnnnnnnnnnnnnnnnnnnnnnnnnnnnnnnnnnnnnnnnnnnnnnnnnnnnnnnnnnnnnnnnnnnnnnnnnnnnnnnnnnnnnnnnnnnnnnnnnnnnnnnnnnnnnnnnnnnnnnnnnnnnnnnnnnnnnnnnnnnnnnnnnnnnnnnnnnnnnnnnnnnnnnnnnnnnnnnnnnnnnnnnnnnnnnnnnnnnnnnnnnnnnnnnnnnnnnnnnnnnnnnnnnnnnnnnnnnnnnnnnnnnnnnnnnnnnnnnnnnnnnnnnnnnnnnnnnnnnnnnnnnnnnnnnnnnnnnnnnnnnnnnnnnnnnnnnnnnnnnnnnnnnnnnnnnnnnnnnnnnnnnnnnnnnnnnnnnnnnnnnnnnnnnnnnnnnnnnnnnnnnnnnnnnnnnnnnnnnnnnnnnnnnnnnnnnnnnnnnnnnnnnnnnnnnnnnnnnnnnnnnnnnnnnnnnnnnnnnnnnnnnnnnnnnnnnnnnnnnnnnnnnnnnnnnnnnnnnnnnnnnnnnnnnnnnnnnnnnnnnnnnnnnnnnnnnnnnnnnnnnnnnnnnnnnnnnnnnnnnnnnnnnnnnnnnnnnnnnnnnnnnnnnnnnnnnnnnnnnnnnnnnnnnnnnnnnnnnnnnnnnnnnnnnnnnnnnnnnnnnnnnnnnnnnnnnnnnnnnnnnnnnnnnnnnnnnnnnnnnnnnnnnnnnnnnnnnnnnnnnnnnnnnnnnnnnnnnnnnnnnnnnnnnnnnnnnnnnnnnnnnnnnnnnnnnnnnnnnnnnnnnnnnnnnnnnnnnnnnnnnnnnnnnnnnnnnnnnnnnnnnnnnnnnnnnnnnnnnnnnnnnnnnnnnnnnnnnnnnnnnnnnnnnnnnnnnnnnnnnnnnnnnnnnnnnnnnnnnnnnnnnnnnnnnnnnnnnnnnnnnnnnnnnnnnnnnnnnnnnnnnnnnnnnnnnnnnnnnnnnnnnnnnnnnnnnnnnnnnnnnnnnnnnnnnnnnnnnnnnnnnnnnnnnnnnnnnnnnnnnnnnnnnnnnnnnnnnnnnnnnnnnnnnnnnnnnnnnnnnnnnnnnnnnnnnnnnnnnnnnnnnnnnnnnnnnnnnnnnnnnnnnnnnnnnnnnnnnnnnnnnnnnnnnnnnnnnnnnnnnnnnnnnnnnnnnnnnnnnnnnnnnnnnnnnnnnnnnnnnnnnnnnnnnnnnnnnnnnnnnnnnnnnnnnnnnnnnnnnnnnnnnnnnnnnnnnnnnnnnnnnnnnnnnnnnnnnnnnnnnnnnnnnnnnnnnnnnnnnnnnnnnnnnnnnnnnnnnnnnnnnnnnnnnnnnnnnnnnnnnnnnnnnnnnnnnnnnnnnnnnnnnnnnnnnnnnnnnnnnnnnnnnnnnnnnnnnnnnnnnnnnnnnnnnnnnnnnnnnnnnnnnnnnnnnnnnnnnnnnnnnnnnnnnnnnnnnnnnnnnnnnnnnnnnnnnnnnnnnnnnnnnnnnnnnnnnnnnnnnnnnnnnnnnnnnnnnnnnnnnnnnnnnnnnnnnnnnnnnnnnnnnnnnnnnnnnnnnnnnnnnnnnnnnnnnnnnnnnnnnnnnnnnnnnnnnnnnnnnnnnnnnnnnnnnnnnnnnnnnnnnnnnnnnnnnnnnnnnnnnnnnnnnnnnnnnnnnnnnnnnnnnnnnnnnnnnnnnnnnnnnnnnnnnnnnnnnnnnnnnnnnnnnnnnnnnnnnnnnnnnnnnnnnnnnnnnnnnnnnnnnnnnnnnnnnnnnnnnnnnnnnnnnnnnnnnnnnnnnnnnnnnnnnnnnnnnnnnnnnnnnnnnnnnnnnnnnnnnnnnnnnnnnnnnnnnnnnnnnnnnnnnnnnnnnnnnnnnnnnnnnnnnnnnnnnnnnnnnnnnnnnnnnnnnnnnnnnnnnnnnnnnnnnnnnnnnnnnnnnnnnnnnnnnnnnnnnnnnnnnnnnnnnnnnnnnnnnnnnnnnnnnnnnnnnnnnnnnnnnnnnnnnnnnnnnnnnnnnnnnnnnnnnnnnnnnnnnnnnnnnnnnnnnnnnnnnnnnnnnnnnnnnnnnnnnnnnnnnnnnnnnnnnnnnnnnnnnnnnnnnnnnnnnnnnnnnnnnnnnnnnnnnnnnnnnnnnnnnnnnnnnnnnnnnnnnnnnnnnnnnnnnnnnnnnnnnnnnnnnnnnnnnnnnnnnnnnnnnnnnnnnnnnnnnnnnnnnnnnnnnnnnnnnnnnnnnnnnnnnnnnnnnnnnnnnnnnnnnnnnnnnnnnnnnnnnnnnnnnnnnnnnnnnnnnnnnnnnnnnnnnnnnnnnnnnnnnnnnnnnnnnnnnnnnnnnnnnnnnnnnnnnnnnnnnnnnnnnnnnnnnnnnnnnnnnnnnnnnnnnnnnnnnnnnnnnnnnnnnnnnnnnnnnnnnnnnnnnnnnnnnnnnnnnnnnnnnnnnnnnnnnnnnnnnnnnnnnnnnnnnnnnnnnnnnnnnnnnnnnnnnnnnnnnnnnnnnnnnnnnnnnnnnnnnnnnnnnnnnnnnnnnnnnnnnnnnnnnnnnnnnnnnnnnnnnnnnnnnnnnnnnnnnnnnnnnnnnnnnnnnnnnnnnnnnnnnnnnnnnnnnnnnnnnnnnnnnnnnnnnnnnnnnnnnnnnnnnnnnnnnnnnnnnnnnnnnnnnnnnnnnnnnnnnnnnnnnnnnnnnnnnnnnnnnnnnnnnnnnnnnnnnnnnnnnnnnnnnnnnnnnnnnnnnnnnnnnnnnnnnnnnnnnnnnnnnnnnnnnnnnnnnnnnnnnnnnnnnnnnnnnnnnnnnnnnnnnnnnnnnnnnnnnnnnnnnnnnnnnnnnnnnnnnnnnnnnnnnnnnnnnnnnnnnnnnnnnnnnnnnnnnnnnnnnnnnnnnnnnnnnnnnnnnnnnnnnnnnnnnnnnnnnnnnnnnnnnnnnnnnnnnnnnnnnnnnnnnnnnnnnnnnnnnnnnnnnnnnnnnnnnnnnnnnnnnnnnnnnnnnnnnnnnnnnnnnnnnnnnnnnnnnnnnnnnnnnnnnnnnnnnnnnnnnnnnnnnnnnnnnnnnnnnnnnnnnnnnnnnnnnnnnnnnnnnnnnnnnnnnnnnnnnnnnnnnnnnnnnnnnnnnnnnnnnnnnnnnnnnnnnnnnnnnnnnnnnnnnnnnnnnnnnnnnnnnnnnnnnnnnnnnnnnnnnnnnnnnnnnnnnnnnnnnnnnnnnnnnnnnnnnnnnnnnnnnnnnnnnnnnnnnnnnnnnnnnnnnnnnnnnnnnnnnnnnnnnnnnnnnnnnnnnnnnnnnnnnnnnnnnnnnnnnnnnnnnnnnnnnnnnnnnnnnnnnnnnnnnnnnnnnnnnnnnnnnnnnnnnnnnnnnnnnnnnnnnnnnnnnnnnnnnnnnnnnnnnnnnnnnnnnnnnnnnnnnnnnnnnnnnnnnnnnnnnnnnnnnnnnnnnnnnnnnnnnnnnnnnnnnnnnnnnnnnnnnnnnnnnnnnnnnnnnnnnnnnnnnnnnnnnnnnnnnnnnnnnnnnnnnnnnnnnnnnnnnnnnnnnnnnnnnnnnnnnnnnnnnnnnnnnnnnnnnnnnnnnnnnnnnnnnnnnnnnnnnnnnnnnnnnnnnnnnnnnnnnnnnnnnnnnnnnnnnnnnnnnnnnnnnnnnnnnnnnnnnnnnnnnnnnnnnnnnnnnnnnnnnnnnnnnnnnnnnnnnnnnnnnnnnnnnnnnnnnnnnnnnnnnnnnnnnnnnnnnnnnnnnnnnnnnnnnnnnnnnnnnnnnnnnnnnnnnnnnnnnnnnnnnnnnnnnnnnnnnnnnnnnnnnnnnnnnnnnnnnnnnnnnnnnnnnnnnnnnnnnnnnnnnnnnnnnnnnnnnnnnnnnnnnnnnnnnnnnnnnnnnnnnnnnnnnnnnnnnnnnnnnnnnnnnnnnnnnnnnnnnnnnnnnnnnnnnnnnnnnnnnnnnnnnnnnnnnnnnnnnnnnnnnnnnnnnnnnnnnnnnnnnnnnnnnnnnnnnnnnnnnnnnnnnnnnnnnnnnnnnnnnnnnnnnnnnnnnnnnnnnnnnnnnnnnnnnnnnnnnnnnnnnnnnnnnnnnnnnnnnnnnnnnnnnnnnnnnnnnnnnnnnnnnnnnnnnnnnnnnnnnnnnnnnnnnnnnnnnnnnnnnnnnnnnnnnnnnnnnnnnnnnnnnnnnnnnnnnnnnnnnnnnnnnnnnnnnnnnnnnnnnnnnnnnnnnnnnnnnnnnnnnnnnnnnnnnnnnnnnnnnnnnnnnnnnnnnnnnnnnnnnnnnnnnnnnnnnnnnnnnnnnnnnnnnnnnnnnnnnnnnnnnnnnnnnnnnnnnnnnnnnnnnnnnnnnnnnnnnnnnnnnnnnnnnnnnnnnnnnnnnnnnnnnnnnnnnnnnnnnnnnnnnnnnnnnnnnnnnnnnnnnnnnnnnnnnnnnnnnnnnnnnnnnnnnnnnnnnnnnnnnnnnnnnnnnnnnnnnnnnnnnnnnnnnnnnnnnnnnnnnnnnnnnnnnnnnnnnnnnnnnnnnnnnnnnnnnnnnnnnnnnnnnnnnnnnnnnnnnnnnnnnnnnnnnnnnnnnnnnnnnnnnnnnnnnnnnnnnnnnnnnnnnnnnnnnnnnnnnnnnnnnnnnnnnnnnnnnnnnnnnnnnnnnnnnnnnnnnnnnnnnnnnnnnnnnnnnnnnnnnnnnnnnnnnnnnnnnnnnnnnnnnnnnnnnnnnnnnnnnnnnnnnnnnnnnnnnnnnnnnnnnnnnnnnnnnnnnnnnnnnnnnnnnnnnnnnnnnnnnnnnnnnnnnnnnnnnnnnnnnnnnnnnnnnnnnnnnnnnnnnnnnnnnnnnnnnnnnnnnnnnnnnnnnnnnnnnnnnnnnnnnnnnnnnnnnnnnnnnnnnnnnnnnnnnnnnnnnnnnnnnnnnnnnnnnnnnnnnnnnnnnnnnnnnnnnnnnnnnnnnnnnnnnnnnnnnnnnnnnnnnnnnnnnnnnnnnnnnnnnnnnnnnnnnnnnnnnnnnnnnnnnnnnnnnnnnnnnnnnnnnnnnnnnnnnnnnnnnnnnnnnnnnnnnnnnnnnnnnnnnnnnnnnnnnnnnnnnnnnnnnnnnnnnnnnnnnnnnnnnnnnnnnnnnnnnnnnnnnnnnnnnnnnnnnnnnnnnnnnnnnnnnnnnnnnnnnnnnnnnnnnnnnnnnnnnnnnnnnnnnnnnnnnnnnnnnnnnnnnnnnnnnnnnnnnnnnnnnnnnnnnnnnnnnnnnnnnnnnnnnnnnnnnnnnnnnnnnnnnnnnnnnnnnnnnnnnnnnnnnnnnnnnnnnnnnnnnnnnnnnnnnnnnnnnnnnnnnnnnnnnnnnnnnnnnnnnnnnnnnnnnnnnnnnnnnnnnnnnnnnnnnnnnnnnnnnnnnnnnnnnnnnnnnnnnnnnnnnnnnnnnnnnnnnnnnnnnnnnnnnnnnnnnnnnnnnnnnnnnnnnnnnnnnnnnnnnnnnnnnnnnnnnnnnnnnnnnnnnnnnnnnnnnnnnnnnnnnnnnnnnnnnnnnnnnnnnnnnnnnnnnnnnnnnnnnnnnnnnnnnnnnnnnnnnnnnnnnnnnnnnnnnnnnnnnnnnnnnnnnnnnnnnnnnnnnnnnnnnnnnnnnnnnnnnnnnnnnnnnnnnnnnnnnnnnnnnnnnnnnnnnnnnnnnnnnnnnnnnnnnnnnnnnnnnnnnnnnnnnnnnnnnnnnnnnnnnnnnnnnnnnnnnnnnnnnnnnnnnnnnnnnnnnnnnnnnnnnnnnnnnnnnnnnnnnnnnnnnnnnnnnnnnnnnnnnnnnnnnnnnnnnnnnnnnnnnnnnnnnnnnnnnnnnnnnnnnnnnnnnnnnnnnnnnnnnnnnnnnnnnnnnnnnnnnnnnnnnnnnnnnnnnnnnnnnnnnnnnnnnnnnnnnnnnnnnnnnnnnnnnnnnnnnnnnnnnnnnnnnnnnnnnnnnnnnnnnnnnnnnnnnnnnnnnnnnnnnnnnnnnnnnnnnnnnnnnnnnnnnnnnnnnnnnnnnnnnnnnnnnnnnnnnnnnnnnnnnnnnnnnnnnnnnnnnnnnnnnnnnnnnnnnnnnnnnnnnnnnnnnnnnnnnnnnnnnnnnnnnnnnnnnnnnnnnnnnnnnnnnnnnnnnnnnnnnnnnnnnnnnnnnnnnnnnnnnnnnnnnnnnnnnnnnnnnnnnnnnnnnnnnnnnnnnnnnnnnnnnnnnnnnnnnnnnnnnnnnnnnnnnnnnnnnnnnnnnnnnnnnnnnnnnnnnnnnnnnnnnnnnnnnnnnnnnnnnnnnnnnnnnnnnnnnnnnnnnnnnnnnnnnnnnnnnnnnnnnnnnnnnnnnnnnnnnnnnnnnnnnnnnnnnnnnnnnnnnnnnnnnnnnnnnnnnnnnnnnnnnnnnnnnnnnnnnnnnnnnnnnnnnnnnnnnnnnnnnnnnnnnnnnnnnnnnnnnnnnnnnnnnnnnnnnnnnnnnnnnnnnnnnnnnnnnnnnnnnnnnnnnnnnnnnnnnnnnnnnnnnnnnnnnnnnnnnnnnnnnnnnnnnnnnnnnnnnnnnnnnnnnnnnnnnnnnnnnnnnnnnnnnnnnnnnnnnnnnnnnnnnnnnnnnnnnnnnnnnnnnnnnnnnnnnnnnnnnnnnnnnnnnnnnnnnnnnnnnnnnnnnnnnnnnnnnnnnnnnnnnnnnnnnnnnnnnnnnnnnnnnnnnnnnnnnnnnnnnnnnnnnnnnnnnnnnnnnnnnnnnnnnnnnnnnnnnnnnnnnnnnnnnnnnnnnnnnnnnnnnnnnnnnnnnnnnnnnnnnnnnnnnnnnnnnnnnnnnnnnnnnnnnnnnnnnnnnnnnnnnnnnnnnnnnnnnnnnnnnnnnnnnnnnnnnnnnnnnnnnnnnnnnnnnnnnnnnnnnnnnnnnnnnnnnnnnnnnnnnnnnnnnnnnnnnnnnnnnnnnnnnnnnnnnnnnnnnnnnnnnnnnnnnnnnnnnnnnnnnnnnnnnnnnnnnnnnnnnnnnnnnnnnnnnnnnnnnnnnnnnnnnnnnnnnnnnnnnnnnnnnnnnnnnnnnnnnnnnnnnnnnnnnnnnnnnnnnnnnnnnnnnnnnnnnnnnnnnnnnnnnnnnnnnnnnnnnnnnnnnnnnnnnnnnnnnnnnnnnnnnnnnnnnnnnnnnnnnnnnnnnnnnnnnnnnnnnnnnnnnnnnnnnnnnnnnnnnnnnnnnnnnnnnnnnnnnnnnnnnnnnnnnnnnnnnnnnnnnnnnnnnnnnnnnnnnnnnnnnnnnnnnnnnnnnnnnnnnnnnnnnnnnnnnnnnnnnnnnnnnnnnnnnnnnnnnnnnnnnnnnnnnnnnnnnnnnnnnnnnnnnnnnnnnnnnnnnnnnnnnnnnnnnnnnnnnnnnnnnnnnnnnnnnnnnnnnnnnnnnnnnnnnnnnnnnnnnnnnnnnnnnnnnnnnnnnnnnnnnnnnnnnnnnnnnnnnnnnnnnnnnnnnnnnnnnnnnnnnnnnnnnnnnnnnnnnnnnnnnnnnnnnnnnnnnnnnnnnnnnnnnnnnnnnnnnnnnnnnnnnnnnnnnnnnnnnnnnnnnnnnnnnnnnnnnnnnnnnnnnnnnnnnnnnnnnnnnnnnnnnnnnnnnnnnnnnnnnnnnnnnnnnnnnnnnnnnnnnnnnnnnnnnnnnnnnnnnnnnnnnnnnnnnnnnnnnnnnnnnnnnnnnnnnnnnnnnnnnnnnnnnnnnnnnnnnnnnnnnnnnnnnnnnnnnnnnnnnnnnnnnnnnnnnnnnnnnnnnnnnnnnnnnnnnnnnnnnnnnnnnnnnnnnnnnnnnnnnnnnnnnnnnnnnnnnnnnnnnnnnnnnnnnnnnnnnnnnnnnnnnnnnnnnnnnnnnnnnnnnnnnnnnnnnnnnnnnnnnnnnnnnnnnnnnnnnnnnnnnnnnnnnnnnnnnnnnnnnnnnnnnnnnnnnnnnnnnnnnnnnnnnnnnnnnnnnnnnnnnnnnnnnnnnnnnnnnnnnnnnnnnnnnnnnnnnnnnnnnnnnnnnnnnnnnnnnnnnnnnnnnnnnnnnnnnnnnnnnnnnnnnnnnnnnnnnnnnnnnnnnnnnnnnnnnnnnnnnnnnnnnnnnnnnnnnnnnnnnnnnnnnnnnnnnnnnnnnnnnnnnnnnnnnnnnnnnnnnnnnnnnnnnnnnnnnnnnnnnnnnnnnnnnnnnnnnnnnnnnnnnnnnnnnnnnnnnnnnnnnnnnnnnnnnnnnnnnnnnnnnnnnnnnnnnnnnnnnnnnnnnnnnnnnnnnnnnnnnnnnnnnnnnnnnnnnnnnnnnnnnnnnnnnnnnnnnnnnnnnnnnnnnnnnnnnnnnnnnnnnnnnnnnnnnnnnnnnnnnnnnnnnnnnnnnnnnnnnnnnnnnnnnnnnnnnnnnnnnnnnnnnnnnnnnnnnnnnnnnnnnnnnnnnnnnnnnnnnnnnnnnnnnnnnnnnnnnnnnnnnnnnnnnnnnnnnnnnnnnnnnnnnnnnnnnnnnnnnnnnnnnnnnnnnnnnnnnnnnnnnnnnnnnnnnnnnnnnnnnnnnnnnnnnnnnnnnnnnnnnnnnnnnnnnnnnnnnnnnnnnnnnnnnnnnnnnnnnnnnnnnnnnnnnnnnnnnnnnnnnnnnnnnnnnnnnnnnnnnnnnnnnnnnnnnnnnnnnnnnnnnnnnnnnnnnnnnnnnnnnnnnnnnnnnnnnnnnnnnnnnnnnnnnnnnnnnnnnnnnnnnnnnnnnnnnnnnnnnnnnnnnnnnnnnnnnnnnnnnnnnnnnnnnnnnnnnnnnnnnnnnnnnnnnnnnnnnnnnnnnnnnnnnnnnnnnnnnnnnnnnnnnnnnnnnnnnnnnnnnnnnnnnnnnnnnnnnnnnnnnnnnnnnnnnnnnnnnnnnnnnnnnnnnnnnnnnnnnnnnnnnnnnnnnnnnnnnnnnnnnnnnnnnnnnnnnnnnnnnnnnnnnnnnnnnnnnnnnnnnnnnnnnnnnnnnnnnnnnnnnnnnnnnnnnnnnnnnnnnnnnnnnnnnnnnnnnnnnnnnnnnnnnnnnnnnnnnnnnnnnnnnnnnnnnnnnnnnnnnnnnnnnnnnnnnnnnnnnnnnnnnnnnnnnnnnnnnnnnnnnnnnnnnnnnnnnnnnnnnnnnnnnnnnnnnnnnnnnnnnnnnnnnnnnnnnnnnnnnnnnnnnnnnnnnnnnnnnnnnnnnnnnnnnnnnnnnnnnnnnnnnnnnnnnnnnnnnnnnnnnnnnnnnnnnnnnnnnnnnnnnnnnnnnnnnnnnnnnnnnnnnnnnnnnnnnnnnnnnnnnnnnnnnnnnnnnnnnnnnnnnnnnnnnnnnnnnnnnnnnnnnnnnnnnnnnnnnnnnnnnnnnnnnnnnnnnnnnnnnnnnnnnnnnnnnnnnnnnnnnnnnnnnnnnnnnnnnnnnnnnnnnnnnnnnnnnnnnnnnnnnnnnnnnnnnnnnnnnnnnnnnnnnnnnnnnnnnnnnnnnnnnnnnnnnnnnnnnnnnnnnnnnnnnnnnnnnnnnnnnnnnnnnnnnnnnnnnnnnnnnnnnnnnnnnnnnnnnnnnnnnnnnnnnnnnnnnnnnnnnnnnnnnnnnnnnnnnnnnnnnnnnnnnnnnnnnnnnnnnnnnnnnnnnnnnnnnnnnnnnnnnnnnnnnnnnnnnnnnnnnnnnnnnnnnnnnnnnnnnnnnnnnnnnnnnnnnnnnnnnnnnnnnnnnnnnnnnnnnnnnnnnnnnnnnnnnnnnnnnnnnnnnnnnnnnnnnnnnnnnnnnnnnnnnnnnnnnnnnnnnnnnnnnnnnnnnnnnnnnnnnnnnnnnnnnnnnnnnnnnnnnnnnnnnnnnnnnnnnnnnnnnnnnnnnnnnnnnnnnnnnnnnnnnnnnnnnnnnnnnnnnnnnnnnnnnnnnnnnnnnnnnnnnnnnnnnnnnnnnnnnnnnnnnnnnnnnnnnnnnnnnnnnnnnnnnnnnnnnnnnnnnnnnnnnnnnnnnnnnnnnnnnnnnnnnnnnnnnnnnnnnnnnnnnnnnnnnnnnnnnnnnnnnnnnnnnnnnnnnnnnnnnnnnnnnnnnnnnnnnnnnnnnnnnnnnnnnnnnnnnnnnnnnnnnnnnnnnnnnnnnnnnnnnnnnnnnnnnnnnnnnnnnnnnnnnnnnnnnnnnnnnnnnnnnnnnnnnnnnnnnnnnnnnnnnnnnnnnnnnnnnnnnnnnnnnnnnnnnnnnnnnnnnnnnnnnnnnnnnnnnnnnnnnnnnnnnnnnnnnnnnnnnnnnnnnnnnnnnnnnnnnnnnnnnnnnnnnnnnnnnnnnnnnnnnnnnnnnnnnnnnnnnnnnnnnnnnnnnnnnnnnnnnnnnnnnnnnnnnnnnnnnnnnnnnnnnnnnnnnnnnnnnnnnnnnnnnnnnnnnnnnnnnnnnnnnnnnnnnnnnnnnnnnnnnnnnnnnnnnnnnnnnnnnnnnnnnnnnnnnnnnnnnnnnnnnnnnnnnnnnnnnnnnnnnnnnnnnnnnnnnnnnnnnnnnnnnnnnnnnnnnnnnnnnnnnnnnnnnnnnnnnnnnnnnnnnnnnnnnnnnnnnnnnnnnnnnnnnnnnnnnnnnnnnnnnnnnnnnnnnnnnnnnnnnnnnnnnnnnnnnnnnnnnnnnnnnnnnnnnnnnnnnnnnnnnnnnnnnnnnnnnnnnnnnnnnnnnnnnnnnnnnnnnnnnnnnnnnnnnnnnnnnnnnnnnnnnnnnnnnnnnnnnnnnnnnnnnnnnnnnnnnnnnnnnnnnnnnnnnnnnnnnnnnnnnnnnnnnnnnnnnnnnnnnnnnnnnnnnnnnnnnnnnnnnnnnnnnnnnnnnnnnnnnnnnnnnnnnnnnnnnnnnnnnnnnnnnnnnnnnnnnnnnnnnnnnnnnnnnnnnnnnnnnnnnnnnnnnnnnnnnnnnnnnnnnnnnnnnnnnnnnnnnnnnnnnnnnnnnnnnnnnnnnnnnnnnnnnnnnnnnnnnnnnnnnnnnnnnnnnnnnnnnnnnnnnnnnnnnnnnnnnnnnnnnnnnnnnnnnnnnnnnnnnnnnnnnnnnnnnnnnnnnnnnnnnnnnnnnnnnnnnnnnnnnnnnnnnnnnnnnnnnnnnnnnnnnnnnnnnnnnnnnnnnnnnnnnnnnnnnnnnnnnnnnnnnnnnnnnnnnnnnnnnnnnnnnnnnnnnnnnnnnnnnnnnnnnnnnnnnnnnnnnnnnnnnnnnnnnnnnnnnnnnnnnnnnnnnnnnnnnnnnnnnnnnnnnnnnnnnnnnnnnnnnnnnnnnnnnnnnnnnnnnnnnnnnnnnnnnnnnnnnnnnnnnnnnnnnnnnnnnnnnnnnnnnnnnnnnnnnnnnnnnnnnnnnnnnnnnnnnnnnnnnnnnnnnnnnnnnnnnnnnnnnnnnnnnnnnnnnnnnnnnnnnnnnnnnnnnnnnnnnnnnnnnnnnnnnnnnnnnnnnnnnnnnnnnnnnnnnnnnnnnnnnnnnnnnnnnnnnnnnnnnnnnnnnnnnnnnnnnnnnnnnnnnnnnnnnnnnnnnnnnnnnnnnnnnnnnnnnnnnnnnnnnnnnnnnnnnnnnnnnnnnnnnnnnnnnnnnnnnnnnnnnnnnnnnnnnnnnnnnnnnnnnnnnnnnnnnnnnnnnnnnnnnnnnnnnnnnnnnnnnnnnnnnnnnnnnnnnnnnnnnnnnnnnnnnnnnnnnnnnnnnnnnnnnnnnnnnnnnnnnnnnnnnnnnnnnnnnnnnnnnnnnnnnnnnnnnnnnnnnnnnnnnnnnnnnnnnnnnnnnnnnnnnnnnnnnnnnnnnnnnnnnnnnnnnnnnnnnnnnnnnnnnnnnnnnnnnnnnnnnnnnnnnnnnnnnnnnnnnnnnnnnnnnnnnnnnnnnnnnnnnnnnnnnnnnnnnnnnnnnnnnnnnnnnnnnnnnnnnnnnnnnnnnnnnnnnnnnnnnnnnnnnnnnnnnnnnnnnnnnnnnnnnnnnnnnnnnnnnnnnnnnnnnnnnnnnnnnnnnnnnnnnnnnnnnnnnnnnnnnnnnnnnnnnnnnnnnnnnnnnnnnnnnnnnnnnnnnnnnnnnnnnnnnnnnnnnnnnnnnnnnnnnnnnnnnnnnnnnnnnnnnnnnnnnnnnnnnnnnnnnnnnnnnnnnnnnnnnnnnnnnnnnnnnnnnnnnnnnnnnnnnnnnnnnnnnnnnnnnnnnnnnnnnnnnnnnnnnnnnnnnnnnnnnnnnnnnnnnnnnnnnnnnnnnnnnnnnnnnnnnnnnnnnnnnnnnnnnnnnnnnnnnnnnnnnnnnnnnnnnnnnnnnnnnnnnnnnnnnnnnnnnnnnnnnnnnnnnnnnnnnnnnnnnnnnnnnnnnnnnnnnnnnnnnnnnnnnnnnnnnnnnnnnnnnnnnnnnnnnnnnnnnnnnnnnnnnnnnnnnnnnnnnnnnnnnnnnnnnnnnnnnnnnnnnnnnnnnnnnnnnnnnnnnnnnnnnnnnnnnnnnnnnnnnnnnnnnnnnnnnnnnnnnnnnnnnnnnnnnnnnnnnnnnnnnnnnnnnnnnnnnnnnnnnnnnnnnnnnnnnnnnnnnnnnnnnnnnnnnnnnnnnnnnnnnnnnnnnnnnnnnnnnnnnnnnnnnnnnnnnnnnnnnnnnnnnnnnnnnnnnnnnnnnnnnnnnnnnnnnnnnnnnnnnnnnnnnnnnnnnnnnnnnnnnnnnnnnnnnnnnnnnnnnnnnnnnnnnnnnnnnnnnnnnnnnnnnnnnnnnnnnnnnnnnnnnnnnnnnnnnnnnnnnnnnnnnnnnnnnnnnnnnnnnnnnnnnnnnnnnnnnnnnnnnnnnnnnnnnnnnnnnnnnnnnnnnnnnnnnnnnnnnnnnnnnnnnnnnnnnnnnnnnnnnnnnnnnnnnnnnnnnnnnnnnnnnnnnnnnnnnnnnnnnnnnnnnnnnnnnnnnnnnnnnnnnnnnnnnnnnnnnnnnnnnnnnnnnnnnnnnnnnnnnnnnnnnnnnnnnnnnnnnnnnnnnnnnnnnnnnnnnnnnnnnnnnnnnnnnnnnnnnnnnnnnnnnnnnnnnnnnnnnnnnnnnnnnnnnnnnnnnnnnnnnnnnnnnnnnnnnnnnnnnnnnnnnnnnnnnnnnnnnnnnnnnnnnnnnnnnnnnnnnnnnnnnnnnnnnnnnnnnnnnnnnnnnnnnnnnnnnnnnnnnnnnnnnnnnnnnnnnnnnnnnnnnnnnnnnnnnnnnnnnnnnnnnnnnnnnnnnnnnnnnnnnnnnnnnnnnnnnnnnnnnnnnnnnnnnnnnnnnnnnnnnnnnnnnnnnnnnnnnnnnnnnnnnnnnnnnnnnnnnnnnnnnnnnnnnnnnnnnnnnnnnnnnnnnnnnnnnnnnnnnnnnnnnnnnnnnnnnnnnnnnnnnnnnnnnnnnnnnnnnnnnnnnnnnnnnnnnnnnnnnnnnnnnnnnnnnnnnnnnnnnnnnnnnnnnnnnnnnnnnnnnnnnnnnnnnnnnnnnnnnnnnnnnnnnnnnnnnnnnnnnnnnnnnnnnnnnnnnnnnnnnnnnnnnnnnnnnnnnnnnnnnnnnnnnnnnnnnnnnnnnnnnnnnnnnnnnnnnnnnnnnnnnnnnnnnnnnnnnnnnnnnnnnnnnnnnnnnnnnnnnnnnnnnnnnnnnnnnnnnnnnnnnnnnnnnnnnnnnnnnnnnnnnnnnnnnnnnnnnnnnnnnnnnnnnnnnnnnnnnnnnnnnnnnnnnnnnnnnnnnnnnnnnnnnnnnnnnnnnnnnnnnnnnnnnnnnnnnnnnnnnnnnnnnnnnnnnnnnnnnnnnnnnnnnnnnnnnnnnnnnnnnnnnnnnnnnnnnnnnnnnnnnnnnnnnnnnnnnnnnnnnnnnnnnnnnnnnnnnnnnnnnnnnnnnnnnnnnnnnnnnnnnnnnnnnnnnnnnnnnnnnnnnnnnnnnnnnnnnnnnnnnnnnnnnnnnnnnnnnnnnnnnnnnnnnnnnnnnnnnnnnnnnnnnnnnnnnnnnnnnnnnnnnnnnnnnnnnnnnnnnnnnnnnnnnnnnnnnnnnnnnnnnnnnnnnnnnnnnnnnnnnnnnnnnnnnnnnnnnnnnnnnnnnnnnnnnnnnnnnnnnnnnnnnnnnnnnnnnnnnnnnnnnnnnnnnnnnnnnnnnnnnnnnnnnnnnnnnnnnnnnnnnnnnnnnnnnnnnnnnnnnnnnnnnnnnnnnnnnnnnnnnnnnnnnnnnnnnnnnnnnnnnnnnnnnnnnnnnnnnnnnnnnnnnnnnnnnnnnnnnnnnnnnnnnnnnnnnnnnnnnnnnnnnnnnnnnnnnnnnnnnnnnnnnnnnnnnnnnnnnnnnnnnnnnnnnnnnnnnnnnnnnnnnnnnnnnnnnnnnnnnnnnnnnnnnnnnnnnnnnnnnnnnnnnnnnnnnnnnnnnnnnnnnnnnnnnnnnnnnnnnnnnnnnnnnnnnnnnnnnnnnnnnnnnnnnnnnnnnnnnnnnnnnnnnnnnnnnnnnnnnnnnnnnnnnnnnnnnnnnnnnnnnnnnnnnnnnnnnnnnnnnnnnnnnnnnnnnnnnnnnnnnnnnnnnnnnnnnnnnnnnnnnnnnnnnnnnnnnnnnnnnnnnnnnnnnnnnnnnnnnnnnnnnnnnnnnnnnnnnnnnnnnnnnnnnnnnnnnnnnnnnnnnnnnnnnnnnnnnnnnnnnnnnnnnnnnnnnnnnnnnnnnnnnnnnnnnnnnnnnnnnnnnnnnnnnnnnnnnnnnnnnnnnnnnnnnnnnnnnnnnnnnnnnnnnnnnnnnnnnnnnnnnnnnnnnnnnnnnnnnnnnnnnnnnnnnnnnnnnnnnnnnnnnnnnnnnnnnnnnnnnnnnnnnnnnnnnnnnnnnnnnnnnnnnnnnnnnnnnnnnnnnnnnnnnnnnnnnnnnnnnnnnnnnnnnnnnnnnnnnnnnnnnnnnnnnnnnnnnnnnnnnnnnnnnnnnnnnnnnnnnnnnnnnnnnnnnnnnnnnnnnnnnnnnnnnnnnnnnnnnnnnnnnnnnnnnnnnnnnnnnnnnnnnnnnnnnnnnnnnnnnnnnnnnnnnnnnnnnnnnnnnnnnnnnnnnnnnnnnnnnnnnnnnnnnnnnnnnnnnnnnnnnnnnnnnnnnnnnnnnnnnnnnnnnnnnnnnnnnnnnnnnnnnnnnnnnnnnnnnnnnnnnnnnnnnnnnnnnnnnnnnnnnnnnnnnnnnnnnnnnnnnnnnnnnnnnnnnnnnnnnnnnnnnnnnnnnnnnnnnnnnnnnnnnnnnnnnnnnnnnnnnnnnnnnnnnnnnnnnnnnnnnnnnnnnnnnnnnnnnnnnnnnnnnnnnnnnnnnnnnnnnnnnnnnnnnnnnnnnnnnnnnnnnnnnnnnnnnnnnnnnnnnnnnnnnnnnnnnnnnnnnnnnnnnnnnnnnnnnnnnnnnnnnnnnnnnnnnnnnnnnnnnnnnnnnnnnnnnnnnnnnnnnnnnnnnnnnnnnnnnnnnnnnnnnnnnnnnnnnnnnnnnnnnnnnnnnnnnnnnnnnnnnnnnnnnnnnnnnnnnnnnnnnnnnnnnnnnnnnnnnnnnnnnnnnnnnnnnnnnnnnnnnnnnnnnnnnnnnnnnnnnnnnnnnnnnnnnnnnnnnnnnnnnnnnnnnnnnnnnnnnnnnnnnnnnnnnnnnnnnnnnnnnnnnnnnnnnnnnnnnnnnnnnnnnnnnnnnnnnnnnnnnnnnnnnnnnnnnnnnnnnnnnnnnnnnnnnnnnnnnnnnnnnnnnnnnnnnnnnnnnnnnnnnnnnnnnnnnnnnnnnnnnnnnnnnnnnnnnnnnnnnnnnnnnnnnnnnnnnnnnnnnnnnnnnnnnnnnnnnnnnnnnnnnnnnnnnnnnnnnnnnnnnnnnnnnnnnnnnnnnnnnnnnnnnnnnnnnnnnnnnnnnnnnnnnnnnnnnnnnnnnnnnnnnnnnnnnnnnnnnnnnnnnnnnnnnnnnnnnnnnnnnnnnnnnnnnnnnnnnnnnnnnnnnnnnnnnnnnnnnnnnnnnnnnnnnnnnnnnnnnnnnnnnnnnnnnnnnnnnnnnnnnnnnnnnnnnnnnnnnnnnnnnnnnnnnnnnnnnnnnnnnnnnnnnnnnnnnnnnnnnnnnnnnnnnnnnnnnnnnnnnnnnnnnnnnnnnnnnnnnnnnnnnnnnnnnnnnnnnnnnnnnnnnnnnnnnnnnnnnnnnnnnnnnnnnnnnnnnnnnnnnnnnnnnnnnnnnnnnnnnnnnnnnnnnnnnnnnnnnnnnnnnnnnnnnnnnnnnnnnnnnnnnnnnnnnnnnnnnnnnnnnnnnnnnnnnnnnnnnnnnnnnnnnnnnnnnnnnnnnnnnnnnnnnnnnnnnnnnnnnnnnnnnnnnnnnnnnnnnnnnnnnnnnnnnnnnnnnnnnnnnnnnnnnnnnnnnnnnnnnnnnnnnnnnnnnnnnnnnnnnnnnnnnnnnnnnnnnnnnnnnnnnnnnnnnnnnnnnnnnnnnnnnnnnnnnnnnnnnnnnnnnnnnnnnnnnnnnnnnnnnnnnnnnnnnnnnnnnnnnnnnnnnnnnnnnnnnnnnnnnnnnnnnnnnnnnnnnnnnnnnnnnnnnnnnnnnnnnnnnnnnnnnnnnnnnnnnnnnnnnnnnnnnnnnnnnnnnnnnnnnnnnnnnnnnnnnnnnnnnnnnnnnnnnnnnnnnnnnnnnnnnnnnnnnnnnnnnnnnnnnnnnnnnnnnnnnnnnnnnnnnnnnnnnnnnnnnnnnnnnnnnnnnnnnnnnnnnnnnnnnnnnnnnnnnnnnnnnnnnnnnnnnnnnnnnnnnnnnnnnnnnnnnnnnnnnnnnnnnnnnnnnnnnnnnnnnnnnnnnnnnnnnnnnnnnnnnnnnnnnnnnnnnnnnnnnnnnnnnnnnnnnnnnnnnnnnnnnnnnnnnnnnnnnnnnnnnnnnnnnnnnnnnnnnnnnnnnnnnnnnnnnnnnnnnnnnnnnnnnnnnnnnnnnnnnnnnnnnnnnnnnnnnnnnnnnnnnnnnnnnnnnnnnnnnnnnnnnnnnnnnnnnnnnnnnnnnnnnnnnnnnnnnnnnnnnnnnnnnnnnnnnnnnnnnnnnnnnnnnnnnnnnnnnnnnnnnnnnnnnnnnnnnnnnnnnnnnnnnnnnnnnnnnnnnnnnnnnnnnnnnnnnnnnnnnnnnnnnnnnnnnnnnnnnnnnnnnnnnnnnnnnnnnnnnnnnnnnnnnnnnnnnnnnnnnnnnnnnnnnnnnnnnnnnnnnnnnnnnnnnnnnnnnnnnnnnnnnnnnnnnnnnnnnnnnnnnnnnnnnnnnnnnnnnnnnnnnnnnnnnnnnnnnnnnnnnnnnnnnnnnnnnnnnnnnnnnnnnnnnnnnnnnnnnnnnnnnnnnnnnnnnnnnnnnnnnnnnnnnnnnnnnnnnnnnnnnnnnnnnnnnnnnnnnnnnnnnnnnnnnnnnnnnnnnnnnnnnnnnnnnnnnnnnnnnnnnnnnnnnnnnnnnnnnnnnnnnnnnnnnnnnnnnnnnnnnnnnnnnnnnnnnnnnnnnnnnnnnnnnnnnnnnnnnnnnnnnnnnnnnnnnnnnnnnnnnnnnnnnnnnnnnnnnnnnnnnnnnnnnnnnnnnnnnnnnnnnnnnnnnnnnnnnnnnnnnnnnnnnnnnnnnnnnnnnnnnnnnnnnnnnnnnnnnnnnnnnnnnnnnnnnnnnnnnnnnnnnnnnnnnnnnnnnnnnnnnnnnnnnnnnnnnnnnnnnnnnnnnnnnnnnnnnnnnnnnnnnnnnnnnnnnnnnnnnnnnnnnnnnnnnnnnnnnnnnnnnnnnnnnnnnnnnnnnnnnnnnnnnnnnnnnnnnnnnnnnnnnnnnnnnnnnnnnnnnnnnnnnnnnnnnnnnnnnnnnnnnnnnnnnnnnnnnnnnnnnnnnnnnnnnnnnnnnnnnnnnnnnnnnnnnnnnnnnnnnnnnnnnnnnnnnnnnnnnnnnnnnnnnnnnnnnnnnnnnnnnnnnnnnnnnnnnnnnnnnnnnnnnnnnnnnnnnnnnnnnnnnnnnnnnnnnnnnnnnnnnnnnnnnnnnnnnnnnnnnnnnnnnnnnnnnnnnnnnnnnnnnnnnnnnnnnnnnnnnnnnnnnnnnnnnnnnnnnnnnnnnnnnnnnnnnnnnnnnnnnnnnnnnnnnnnnnnnnnnnnnnnnnnnnnnnnnnnnnnnnnnnnnnnnnnnnnnnnnnnnnnnnnnnnnnnnnnnnnnnnnnnnnnnnnnnnnnnnnnnnnnnnnnnnnnnnnnnnnnnnnnnnnnnnnnnnnnnnnnnnnnnnnnnnnnnnnnnnnnnnnnnnnnnnnnnnnnnnnnnnnnnnnnnnnnnnnnnnnnnnnnnnnnnnnnnnnnnnnnnnnnnnnnnnnnnnnnnnnnnnnnnnnnnnnnnnnnnnnnnnnnnnnnnnnnnnnnnnnnnnnnnnnnnnnnnnnnnnnnnnnnnnnnnnnnnnnnnnnnnnnnnnnnnnnnnnnnnnnnnnnnnnnnnnnnnnnnnnnnnnnnnnnnnnnnnnnnnnnnnnnnnnnnnnnnnnnnnnnnnnnnnnnnnnnnnnnnnnnnnnnnnnnnnnnnnnnnnnnnnnnnnnnnnnnnnnnnnnnnnnnnnnnnnnnnnnnnnnnnnnnnnnnnnnnnnnnnnnnnnnnnnnnnnnnnnnnnnnnnnnnnnnnnnnnnnnnnnnnnnnnnnnnnnnnnnnnnnnnnnnnnnnnnnnnnnnnnnnnnnnnnnnnnnnnnnnnnnnnnnnnnnnnnnnnnnnnnnnnnnnnnnnnnnnnnnnnnnnnnnnnnnnnnnnnnnnnnnnnnnnnnnnnnnnnnnnnnnnnnnnnnnnnnnnnnnnnnnnnnnnnnnnnnnnnnnnnnnnnnnnnnnnnnnnnnnnnnnnnnnnnnnnnnnnnnnnnnnnnnnnnnnnnnnnnnnnnnnnnnnnnnnnnnnnnnnnnnnnnnnnnnnnnnnnnnnnnnnnnnnnnnnnnnnnnnnnnnnnnnnnnnnnnnnnnnnnnnnnnnnnnnnnnnnnnnnnnnnnnnnnnnnnnnnnnnnnnnnnnnnnnnnnnnnnnnnnnnnnnnnnnnnnnnnnnnnnnnnnnnnnnnnnnnnnnnnnnnnnnnnnnnnnnnnnnnnnnnnnnnnnnnnnnnnnnnnnnnnnnnnnnnnnnnnnnnnnnnnnnnnnnnnnnnnnnnnnnnnnnnnnnnnnnnnnnnnnnnnnnnnnnnnnnnnnnnnnnnnnnnnnnnnnnnnnnnnnnnnnnnnnnnnnnnnnnnnnnnnnnnnnnnnnnnnnnnnnnnnnnnnnnnnnnnnnnnnnnnnnnnnnnnnnnnnnnnnnnnnnnnnnnnnnnnnnnnnnnnnnnnnnnnnnnnnnnnnnnnnnnnnnnnnnnnnnnnnnnnnnnnnnnnnnnnnnnnnnnnnnnnnnnnnnnnnnnnnnnnnnnnnnnnnnnnnnnnnnnnnnnnnnnnnnnnnnnnnnnnnnnnnnnnnnnnnnnnnnnnnnnnnnnnnnnnnnnnnnnnnnnnnnnnnnnnnnnnnnnnnnnnnnnnnnnnnnnnnnnnnnnnnnnnnnnnnnnnnnnnnnnnnnnnnnnnnnnnnnnnnnnnnnnnnnnnnnnnnnnnnnnnnnnnnnnnnnnnnnnnnnnnnnnnnnnnnnnnnnnnnnnnnnnnnnnnnnnnnnnnnnnnnnnnnnnnnnnnnnnnnnnnnnnnnnnnnnnnnnnnnnnnnnnnnnnnnnnnnnnnnnnnnnnnnnnnnnnnnnnnnnnnnnnnnnnnnnnnnnnnnnnnnnnnnnnnnnnnnnnnnnnnnnnnnnnnnnnnnnnnnnnnnnnnnnnnnnnnnnnnnnnnnnnnnnnnnnnnnnnnnnnnnnnnnnnnnnnnnnnnnnnnnnnnnnnnnnnnnnnnnnnnnnnnnnnnnnnnnnnnnnnnnnnnnnnnnnnnnnnnnnnnnnnnnnnnnnnnnnnnnnnnnnnnnnnnnnnnnnnnnnnnnnnnnnnnnnnnnnnnnnnnnnnnnnnnnnnnnnnnnnnnnnnnnnnnnnnnnnnnnnnnnnnnnnnnnnnnnnnnnnnnnnnnnnnnnnnnnnnnnnnnnnnnnnnnnnnnnnnnnnnnnnnnnnnnnnnnnnnnnnnnnnnnnnnnnnnnnnnnnnnnnnnnnnnnnnnnnnnnnnnnnnnnnnnnnnnnnnnnnnnnnnnnnnnnnnnnnnnnnnnnnnnnnnnnnnnnnnnnnnnnnnnnnnnnnnnnnnnnnnnnnnnnnnnnnnnnnnnnnnnnnnnnnnnnnnnnnnnnnnnnnnnnnnnnnnnnnnnnnnnnnnnnnnnnnnnnnnnnnnnnnnnnnnnnnnnnnnnnnnnnnnnnnnnnnnnnnnnnnnnnnnnnnnnnnnnnnnnnnnnnnnnnnnnnnnnnnnnnnnnnnnnnnnnnnnnnnnnnnnnnnnnnnnnnnnnnnnnnnnnnnnnnnnnnnnnnnnnnnnnnnnnnnnnnnnnnnnnnnnnnnnnnnnnnnnnnnnnnnnnnnnnnnnnnnnnnnnnnnnnnnnnnnnnnnnnnnnnnnnnnnnnnnnnnnnnnnnnnnnnnnnnnnnnnnnnnnnnnnnnnnnnnnnnnnnnnnnnnnnnnnnnnnnnnnnnnnnnnnnnnnnnnnnnnnnnnnnnnnnnnnnnnnnnnnnnnnnnnnnnnnnnnnnnnnnnnnnnnnnnnnnnnnnnnnnnnnnnnnnnnnnnnnnnnnnnnnnnnnnnnnnnnnnnnnnnnnnnnnnnnnnnnnnnnnnnnnnnnnnnnnnnnnnnnnnnnnnnnnnnnnnnnnnnnnnnnnnnnnnnnnnnnnnnnnnnnnnnnnnnnnnnnnnnnnnnnnnnnnnnnnnnnnnnnnnnnnnnnnnnnnnnnnnnnnnnnnnnnnnnnnnnnnnnnnnnnnnnnnnnnnnnnnnnnnnnnnnnnnnnnnnnnnnnnnnnnnnnnnnnnnnnnnnnnnnnnnnnnnnnnnnnnnnnnnnnnnnnnnnnnnnnnnnnnnnnnnnnnnnnnnnnnnnnnnnnnnnnnnnnnnnnnnnnnnnnnnnnnnnnnnnnnnnnnnnnnnnnnnnnnnnnnnnnnnnnnnnnnnnnnnnnnnnnnnnnnnnnnnnnnnnnnnnnnnnnnnnnnnnnnnnnnnnnnnnnnnnnnnnnnnnnnnnnnnnnnnnnnnnnnnnnnnnnnnnnnnnnnnnnnnnnnnnnnnnnnnnnnnnnnnnnnnnnnnnnnnnnnnnnnnnnnnnnnnnnnnnnnnnnnnnnnnnnnnnnnnnnnnnnnnnnnnnnnnnnnnnnnnnnnnnnnnnnnnnnnnnnnnnnnnnnnnnnnnnnnnnnnnnnnnnnnnnnnnnnnnnnnnnnnnnnnnnnnnnnnnnnnnnnnnnnnnnnnnnnnnnnnnnnnnnnnnnnnnnnnnnnnnnnnnnnnnnnnnnnnnnnnnnnnnnnnnnnnnnnnnnnnnnnnnnnnnnnnnnnnnnnnnnnnnnnnnnnnnnnnnnnnnnnnnnnnnnnnnnnnnnnnnnnnnnnnnnnnnnnnnnnnnnnnnnnnnnnnnnnnnnnnnnnnnnnnnnnnnnnnnnnnnnnnnnnnnnnnnnnnnnnnnnnnnnnnnnnnnnnnnnnnnnnnnnnnnnnnnnnnnnnnnnnnnnnnnnnnnnnnnnnnnnnnnnnnnnnnnnnnnnnnnnnnnnnnnnnnnnnnnnnnnnnnnnnnnnnnnnnnnnnnnnnnnnnnnnnnnnnnnnnnnnnnnnnnnnnnnnnnnnnnnnnnnnnnnnnnnnnnnnnnnnnnnnnnnnnnnnnnnnnnnnnnnnnnnnnnnnnnnnnnnnnnnnnnnnnnnnnnnnnnnnnnnnnnnnnnnnnnnnnnnnnnnnnnnnnnnnnnnnnnnnnnnnnnnnnnnnnnnnnnnnnnnnnnnnnnnnnnnnnnnnnnnnnnnnnnnnnnnnnnnnnnnnnnnnnnnnnnnnnnnnnnnnnnnnnnnnnnnnnnnnnnnnnnnnnnnnnnnnnnnnnnnnnnnnnnnnnnnnnnnnnnnnnnnnnnnnnnnnnnnnnnnnnnnnnnnnnnnnnnnnnnnnnnnnnnnnnnnnnnnnnnnnnnnnnnnnnnnnnnnnnnnnnnnnnnnnnnnnnnnnnnnnnnnnnnnnnnnnnnnnnnnnnnnnnnnnnnnnnnnnnnnnnnnnnnnnnnnnnnnnnnnnnnnnnnnnnnnnnnnnnnnnnnnnnnnnnnnnnnnnnnnnnnnnnnnnnnnnnnnnnnnnnnnnnnnnnnnnnnnnnnnnnnnnnnnnnnnnnnnnnnnnnnnnnnnnnnnnnnnnnnnnnnnnnnnnnnnnnnnnnnnnnnnnnnnnnnnnnnnnnnnnnnnnnnnnnnnnnnnnnnnnnnnnnnnnnnnnnnnnnnnnnnnnnnnnnnnnnnnnnnnnnnnnnnnnnnnnnnnnnnnnnnnnnnnnnnnnnnnnnnnnnnnnnnnnnnnnnnnnnnnnnnnnnnnnnnnnnnnnnnnnnnnnnnnnnnnnnnnnnnnnnnnnnnnnnnnnnnnnnnnnnnnnnnnnnnnnnnnnnnnnnnnnnnnnnnnnnnnnnnnnnnnngatcttacagcagagctggaagctgtatcttcaaaatatgtctgtttgactcaaaacaaggtattcaacaggagttattatgtatgaaaaaatacaacaggaatgtaaaaaacttgaggctaaaaagatgttggaagaagtaatattaaatcttaaaaaacgtatggaaagtacacattggtgaagacacattggtgaagtacaaaaatataaattggatctagaagaaaaggcaatgcaggcaatggaaaaattagtacaaatccctttacaggttagtttgtaaaatcaggtaagtttatttataatgtgctttcatttatttcactgcaaattatattttggagattatatatatatatatatcgtgttttctctgcctctcttgtagtaatttgccttgtggagttctagcaaagaggtggcatctgtttttacttttatatgtttaaatttccatcattataacaaaatcgatttttcacagtaatgattctcagtgtggagtcatttgattattaagacccattgacatgagattacatcctctgcctataaaaatcctggaagaaaacctaggaaatattcatctggacattgcacttggcaatgaatttatgggtaagtcctcaaaagcaattgccagaaaaatgaaaattgacaagtatgatttaattaaactaaagagcttcttctacacagcatgagaaactctcaagggattgaacagacagcctacagaatggaagaaaatattcacacactatgcatacagcaaaggcctattatccagaagccataagagacttatgcaaatcaacgagcaaaaaataaataaccccattaaaaaatgggcaaagaacataaacagacagttttcagaagaacacatatgtggccaacaaacatattaacacatgcataccatcactaatcatcagagaaatgcaaaacaaaacagcagtgaaataccatctcacaccagttagaatgacttctgttaaaaaggaaaaataataaaaatatttaaatatttaatattaaaatatcatttagattgagataaattaatttgtcatcattaattctcaaaacatggatatttaagaataagcttacttcacatgtaataacaactaccttaaaaactaaaagctggggcctggtatggtgtctcaagtctgtaatcccagcactttgggaagctgaggtgggccgatcatgaggccaggagtttgagacaagcctggccaacatggtgaaaccccgtctctactaaaaatacaaaaattagctgggcatggtggtgggcaactgtaatcccagctactcaggaggctgaggcaggagaattcattggaaccctgggaggcggaggtggttgcagtgagctgagatcacaccattgcactgcagcctgggcaacagggcgagactccatctcaaaaaaaataaataaaatgaaatgaataaaaacaaataaataaaagctggaagttctatgaaaacaatgcacataccatttttataaaatgttcatggtttctctagagatttcaatacctattctagcttattacagtaacctataatttgtactataccaactatggtataaaaaccttaaaatgtatatttctgtttcctctctcctttatactatttatgtcatgcattatagtctcaaatattatgaattccataatataaagttactttttttaaaaaaattagacaatcaattatctttagagcaatgtaaaataattgggttatatatctttatatcttctctggcattatttatttctttgtgtagtttcaactttcacctgcttccatattccttttgcctcaagaaatgattttgacatttattttagtgcatacctgttagcaagggactcttccagtgttaatctgaaaatgtcatttaattgttatttttgctgtattacagttaatggatataagattgggggttgacttttcttcagttatttaagaattttgtatcattggtttctgacttgtagagttactgacaagcagttcattataatgtttgtttctgtttatctctctacacagtgttcctattttttctgtgactgaattcaagatttgtggtaatcattggttttcagcagtttgactagtgtgattattctagcgttctttaaattttgtattaatctttcttggatattttgaggttatttggtctccttagtcatctttttcaaatttttcttctctcacattctgtttttactttccttctgtaattccaattaattatattttagttaatttcatattaccagaaaattcttggattcactggagtattttatttgcttggtttattggtttatttggtttttctctttcctccctttgtgctaccattcaaatgatttgtattgacctagtataaaatttactgcttctttctttaactctgatgaccagtctgctaatcagcttgctgatgtaattcatctttgttctcatgctttcacttatttctagattttgccttttactgttcccatctttgctgaaatacctcatttttccatacatgttgtattttttaactagatcctttaacattttgatcattattattttaaattacttgcatttagttccaacatctgaattatctctgaatttgattctgttgactttttatcctttgaaaatattataactcataactcaaatttctaacttgcttttatgtgtctcccaatttctaaaaaatgcaaatcatctgatgtagaaaaacagtagatcatgagataattatgtcaagattgttttatatttctgtttcatttttatgtcatgctattagtgtgggcaggaacaaaggttgctttttgctgcggtgtctgaaacattcagtgaccaatgtaactcagatttctccagcagtaggctgctatgtgatgtgccttgtgtggggccttagactctggagagcatatgccaatgatcctgttccacagttagctttcggtagtccttaccacctatgttatagagagggtctctctccactttcttgttcctctctaactgtagaacatcattttgtgtgtgtgtgtgtgtgactaggcaaaaaattcaggttggggacagaaggatgattcatgttatttttgagccagtttcatcattggacactcacagaaggggtatttttaacacttcttgactcttattctagtgggagtcaaactgtcacttacctgtgttgttttttgcagaagaaataataacttaccctcctcccacctcagtagtagaaaacctctgatttatatcattgcaagttttcaaccccacaataaggacaaactcttttatttctccttccataggaacaatatacctttgtctgtggtcactggatggagactttccaaacctttaccacagtagcacgactctgcattagtgcaaaatcctgggccccaaaacaatccttgttcctctcctgatggaggagtatttttcttgcatccctctcccagaagcagtgatcctttgcctggtatcaggtggggtagggtagggtatgagaggtttcttaaccttctctgaaagctgatgtgttttgcttcttcttatctcccagaaacagtagacttttgcatgggttcatggacccagatgcttttttgccacagcaaattaagggttttgattcttaggagagaagcaaatgttcatgtagtcaatttttttcttatttattttttgctttgttttcttatttcagtaatgatgagttcaatatgatcattattttccacttacactgcttgcaactctaatgttttgtttttgttagtccccctttgacagttcagcactaaatcaaatgcagatagtcatcagttgtgtgaataaagtgtttttaattgagaacaaaattgttgatatagacacaaatttggatattatcctacttagcacaatatgtcgctggttcaaaatgtaaaaacctctttaggctgaacaaagaatggttcttggaactattgtccctttttgacaaataaaataaaacccaatgctttttatctcatggatagattattaaaataactacatacctgatcttcattttatgttctctttcttcaagatattccttcaaaactactttgactgattagtctcttttgaattatgttagactctgtattttctccacaagctcatcagggtaaatcctgcctttacattttttataaaaattctctttttttttcaaatcttagttgagctgaaagatttccaccaaatgtctcctatgccagaaagccttattttacttatctcccctgtcctccttgctcaagctcatttaggaatattttaattaaaacattcatgcaatactgttttttaaaaaatctgaacatatagtattttcaatctgaatacaaaatagtgctctaatttgaaaacaagttttagaaacaaatgtttctagaaggagaatcaacagtgtcataaatatcataatccaattttcctgtttgtactaaaacattagcaaatatttattgagaaattgccatctgcctgaaagtataatgcttttgatgcacattatatcataaaaactaggtactattattagtagtatcttaagagtaaaaatattgagtcttagagaagttaagcaatgtgcccaaatagcatagggaaagttggaattctgaaattctgactatgctgtgcgtaggttaggagaatcaaggcttgtcaaatgtaactgttaagtcattgtggggatacagaggcctctgattgctagggtcaatacacttaagcagatcatgtcactacttagttaaatctatttcattaaagcaaaattccgtaaagattattggcaccaaaactattaattttccttccttcctttctctctttctttccttccttccttccttccttccttccttccttccttccttccttccttccttgtctttctgtctttctttgagacagggtctcattctgttgcccaagctggagtgcagtggcacaatcatggctcactgcagccccagcttccccagactccggtgatcctcccacctcatcctcctgagtagctgggactacaggcaggcaagccactatgcctggctaaattttctttttctttttctttttttttttttttttgtaaagattgggtttcaccatgttgccgagcctggtctgcaactactcagctcaagcaatccacctgcctttgcctcccaaagtattgggactccaggtgtaagccacatgcctggccaaaaatattatttaacaagttcaatttaactattagattttggacaatgagggatagaattttctacatcataaatcatcttgtgttctttatttaaagtaatatgtaaggatttcaatttgattcaaatatatttattagcaaattaaatgtttttttcaggattccaaacttttgttgaagacataaatgttaaatgatgtcactaattttaattagattagcagaaatgtactctggtgtttaataacaatgacagaatgggcaattaattttattttctttccctttctccctttcccctttttaaaatattttacttttcaggctctttggaatcctgtagatagagttttggagaattagacaaaacactcacagaaactgccaacccttggatgaaatatattattactgtgctttgggattaaaataactacagtttatagaacttttgtactgatacacagacactaaaaagggaaagggtttggatgagaagctctgctatgcaaccaggaatctcagccactcatttctgtcggagctgcaggagctccctgtaaagagaggttatggagtctgtagcttcaggaaagatacttaaaacccttcagagtttctccatttttcccagagtttccccaaaaaggttatgacattttataagaatgcttcacttgtgaaaaactaatatcaaagtcttcttgtaatttatatttaaggataaatctttatcccatgtttaatttatttagcttaccctgtagctaatatttcatgctgaacacattttaaatgctgtaaatatagataatataatttatggatcattaatgcctctctagtagtttagagaaaatgtcaaaagaaatggccccagaataagcttcttgatttgtaaaattctatgtcattgactcaagtttgtatgtcatctcaaaatataaatatagacatctcagaaaatatatttgaaatagcaaattcctgttagaaaagaatagtacttaactagataagaataacaagtcaccattatttgaattgtctcctattaatttttgttgtgttgtgttactcatgttttacttatgggggatatacataacttctgctgttttcagaattattgtatacagtcagtatgagaatgcaatttaagtttccttgatgctttctcacacctctattactagaaataagaatacagtaatattggcaaagaaaattgaccagttcaataaaattttttagtaaatctgattgaaaataaacattgcttatggctttcttacatcaatattgttatgtcttagactaccttatgtgaaattaaggctttgaaattctaattatgtgcaaatgtgtaaaatagcatcacctaacgctatataatatactctttatttctataatgtgatggcaggtttataattctggaaagatatacacaacatgaaatttacctttttaatcactttaagtgcacagttttgtggcattaagtatatttgcactattgtgcaacagtcaccaccatagacctccaaaacttgtcttcttctccaactaaaatgctttactcattgaacaccaacttcccattcctctccctctccttccccctagcaatcaccattctactttctgtctctacaactttcactaagtaactcatagaagtggcatgatagaatgtttgaatttttctgactggcttatttcacttagcatgtcttcaagtttcatctattttgtagcatgtgtgagaatatattttaaggctgaatattattatgttgccgtatataccacattttgtttaaccactcatccatcaatattcacaagggctgctccctccctttgattattgtgaataatattgctaatggacacgctgcacaaacatctgtttggtccctctgctcatttattttggatatggatttgcattttaatacaaaggagaaattacacagctttttaaaagtgtccagataaaaaggagcacaacatcagtaaaatattagaaagtagattagggggaaaaacagggaaggaattgaaccaaaagtcaataagctgcataagagagtttcaagaggaggaaaaaattgacaatattaacatagaattaaagagcgataggtagatatttagaaaattgtctcatgtacttatatgtcgcctgtgaactgatatttacattattttattattccaggtttccaaaagtaagtgcaatatgagagtttcatgatgctaaataaactgaaacatgctatatattttgatatattgtccttgagaggaggctgagtggtaattagtgcaattttaaattatgatatgataatgcagtcaatctgccaaactgacaaacagtatatatacaatatgtatacatttctcgcaaaattcagttttatcatacaattaaattatgatttaaaactacctgacaattaatggaggaaaaaaataaaacaacatttgcattaatattaccataattttgatattattgtaaatatcaaaatatgtacttagagataaaccagcaaaaaagagaaacatttgaaaactacaaaactacaaaatattgctaaaataaatgagacctaaataaatggaatttatgagtcataaatctctatattgttaagatgtctactcttcccacattgatctataacaattccaatcaaatcacagctggatttcttattttagaaattgagaaactaaaattctgaaatgtacatcaatgggtagaggacctataatggcaaattactttgaaaggaaacagttactttgaaaccaggtgctgctggagaataaacagcacctggattcaagacttagaacgttacagtaatacttaagacaatgtagtacaaatatagatatacacatgtatatcagctatcagctaatttttgataaagttcttagaccattcatggacataacattttcaacaaatgcttctgaaacaattagatatcccagtatatatttgtgtgtatgtgtgaagctcaatacttcacacctgagaggtatgagtgtgcattacaaaagagaactaggaagctttgagagtattggatatgctcattgtccccttcatggtgattgtttaatgggcacatgtacatatcaaattcatctcatttacactttaaatattggaagtgtgttttatgttcgttagacatgaataaagctgcaaaatgttaccaaatattcacttactatgcttttattcattttcctctctctataaaccttcagatagaaaatgcagttgaaagatatttcataaaggaagaaaagaagtatgaatacaggtgagagatattactgagattttttttcagtgcaatcctggtcttttctgactagcaatatttttatgtgcagaagtagtagaaaagataaatattttgtacagtagaaaaacacattatttctgtgccatggaagagagaactcacaaagatgacagcttctggctatgttggatactaaccagtactgtaagtacccaacgatctgactttaacactggctgtaaagctcctttaatgttcctcgcaaggatttgaacctatttactggaaccctcatcgcttattgagttgaaaaacattgttgatatgtgtttatcttatatttgcagtagagtcataattttactttttagaaaattatatattaaaaaaagacacatgaaattgtatattgtttaatgtttcaactgtgatatcactccatatgcatatttaaattcctatttgataaaggataggaaatacagaaagaattcttgtgataatagcgaacacagaactgttgaaaggtgttgaagctgagctggagagagtcaccaaggctggcgccaaagctggcaaggtcggagggtttcctgcctgggcggcacagcttgagctcgccctgcgtcacgagtggtggaaactgcagacccagctgggccctgaggtctctgcctcagcctcccgcctgctaggagctgcgctgaggtcccagataggcgacactggcggggtgcccctgagcgaaggcagcccatgtgtgggacagcagcaggagaccagggtccagggacccacctcccaccgcgggaacctcgagcctcccctggcacccctagcttggtccgcctggcctccggagcccggtgtgtatcctggtcatggggacgcccaccaggtgcccgggagtccccctcggccacagcctgcggctccgccggccctcaagcccggtgtggggactccagccctgccgcctctgctcccgccaggctgggacctgtcctcctcctgggcgcccggcagtaggggcgatgcacactgcccgctgccctgcacagcctttcgccgcacatcccctctcgcccctctgccccgggccaggaccttcctggccgcacagaacccaccttccttcccgttgcagagctgctccgcttccccaaaccacagggaaaaacggcagatctccaaccaaacagaaatctgtgtgtgactcctctggtttgatactgccagtccccacattttcttccgggtgttttcttggcagaatgtgcccaatgtttgatgtttcaccagcaatgaggctgaaaagtgacagcaatagagaaacacatcaggctttccgcgacaaagatgaccttcccttcttcaaaactcagcaatctccacggcacacaaaggacttaggacaagatgaccgagctggagtgctcgccccaaaatgcaggcccagagtgggtcacctccttagggcaggcccaggcttgtcctggctgccccggcgcctttctcctcactcccacccaatgcaggggaccccacaaactcggctgttggggctccctgctcctccctccacagaagccacctcctgccctccaagctgggggtctcctggggcgtcctgggctgagagggaaagaggccagctccgcaagccgggaagggaacaccgccacattgttacacgcacacaccaccacactgtcacatgtacagacacacggagacattaccacacggacacaccgtcacatggacacactggcacattcacatggacggacacacagacatacggagaaatccacacggacacaccaccacactatcacagggacacacagacacacggagacatcacatggacacaccaccacactatcacagggacacacagacacacaagagacatcactacactgtcacatggacacaccatcacaggaacacacaaacacactgccacatgaacactgccacacagagacacaccgccacactgtcacatggacacacctccacactgtcagacaccaccacacagacactgccatgtggacacaaggacacacagacattgtcacatggatacacaaacacactgtcacacggagacatcaccatgcagatacatgaacacaccaccacatggacatagcaccacacagacactctgccacacggacacaccaccacacagacacaccaccacgctgccacacagagacaccaccacatcattgccacattttcatgtgtcagctggcggtgtgggccccacgactctgagctctaatagagaaattacttaggcatatagtgaaggcaaaattttttttttctgaggcgtagtctcgctctgtcccccaggctggagtgcagtggcgcgatctcggctcactgcaagctccgcctcccgggttcacaccactctcccgcctcagcctcccgagtagctgggactacaggagcccgccaccaagcccggccaccttttgggtgtttttagtacagacggggtttcaccttgctagccaggatggtctggatctcctgacctcgtgatctgcccgccttggcctcccaaagtgctgggactacaggtgtgagccaccgcgcctggccaagaatttctttccatctcctgtgttattgctttggcagtggaaatgcgcgtggcctctagagtgggtcccaaggtcatgaaggcctgtaaggtggagggcaaggtctctctttccaggctggaatggaggaagatgtggtggccgaggggctgcatgtcctcctcgcggcaggcccctgaggacctttatcctcctgagctgcgaatgtccctcaggggtgtctaaagcgctgggtggggcccttataggccttacgagctctggccaattagtggtccgtaaaacgcagaggtgaacaccatagaaccacaggtccaggagaattttgcaaaagctctgaggatgcccttttttgttctcccactgcaaaattgttttaaaaagcaaaaaatccagcaatgtccggggaaagtcaatactgagtgtcagcgcgggatgctgctgctgatacggtcccggcgtcctggccgaaagtggcctcctcggggaccgcatctccgcgcaccatggcagcaaacgccagcggtttgtgggcggatggtgtccccgtggccatccccgctcctgagtgcggaaggacagacaggagcggggacttctgggtgttcctggtgtcagccagcttgacgccgttgttcctcctggaaatccgggatttggagaagcacctggttcctgatggaggccgtgggcctcttggtccccgcttaccaggcagcggcgccagcctagttctcagccccgtccccgatgggcgccgccttccatcaggccaaagactttcctccaaactgcccttcttggggcggggaagcagcatcctgggcctcccctggggcctgtggtgctggcagcagctccacgttgaggtcgcctgcagcccgcactgcggagcactggaggttcctgagcccggtctggggaggccaatccgcaggtgcctggtgcccggtgcctgccgcagtctcaaaagcgcctggaggtgacatccaggagcaccactgcaccacccgcagggagacccacggcgaggcgcgccccctaaagcggccaaggaagaagcagaaggataggaaggcacccagagcttggggtgatctcaggccgcgcgccccgaccaagttcctggtctccgggaggtttttttttaatttcttccatattattatctttattattattaacttttcaagatggattaaagacttaaatgttagacctaaaaccgtaaaaaccctagaagaaaacctaggcaataccattcaggacataggcatgggcaaggacttcatgtctaaatcaccaaaagcaatggcaacaaaagccaaaattgacaaatgggatctaactaaactaaagagcttctgcacagcaaaagaaactaccatcagagtgaacaggcaacttacagaatgggagaaaaattttgcaatctacccatctgacaaagggctaatatccagaatctacaaagaacttaaacaaatatacaagaaaaaatcaaacaatcccatcaaaaagtgggggaaggatatgaacagacacttctcagaagaagacatttatgcagccaacagacacatgaaaaaatgttcatcatcactggccatcagagaaatgcaaatcaaaaccacaatccgggagatattgccaaagacgatgtgggctttctgggcaatgtccggcctgagctggagattctgggacgcggtcaagtggtcctttggagattccacggcttcggatccctactgcaggatgctccgctgtgtctgacagcctctggcattttgctgaggggtaacctcggaatgtatagacataagaacactgggatggcccagtcgtgccccaggcattcccgcacacagtggtcgcaaaggcaggcgctgagacaaagtgcccagtcggcttggtgagagttctttacaggttagtgaaagacttggtcccgtgcttgtgttttctcatgttttcagttaacctgcggacgcccaggggctcctccatctccaccctgttctcctcgggctgaagcccaaagtcccccattttctcctcaaacggctcacagagccacttctgcaggcaggaggacagcggtgggctcagtggctgacctgggaagccacatctgaaggaactgctgggtgactatggccataagtcaatcaaagcagactccctggcttgctgcgctacattgattttgttttcattttttaaaagacgcagaagggaggtcctaggaaatttgcccaatgcagatgctgacaagagtggtgacatgaaaaagattacccagaaggaaaacaagagctattttctaaacatctgaaatctgtataggcttttggaaaagtgaaactagatgcaaagcacaatgatataattctggcaatttccactgacacagaactcagtcaatctgaattaatctaagggttataaggaaaatggcactccaagaagtatctattaacatcactcagctgctgtgaaataggcttacagacaacacggagtgtcaattatccaatgtttaaagtcagtgatacagattggactacaatctctatggctcataaagtcttctttaaaggattgacagatgatttatctcatatgtagacaatgattctcagcagttagctagcacaacttgctaatatcaattgcttgagaaaatcagataattgcttgagaaaattaggacattgcttgaggatgttaggtaattaaataaattacttttttaaagaatagtttaatgttttggcaagtagactttaaaatagattggtaatattttaaaggccacttttaaagaagtagcaatataacatgtggaattatgaaaaataataatgttggaaacaattcaattttctatcacagataatttcacaaatatagaaataccatctcaataattagaagaagtagcagcaatttctgtcatttttatgcaagttactcctagtccatttatctggtcttaaatagtgtttttaaaatttgttttcaaacaagtctaatcataaataatagaatatattttacaatagttgaaggtaacaaaaaataagtgctattttaaaaattgtattagattgtttaaaaatgttgtgggtacgtagtatgtgtatgtatctgtggggtccctgagatgttttgatacaggcatgtaatgtgaaataagcacatcttggggaatggggtatccctcccctcaagcatttatccttcaagttataaaaaatgcaattacagtcttagttacttcaaaatgtaccattaaattattattggatatagtcaccctattgtgctataaaatagtaggtcttattaactctctatttttatacccattaaccatccccaccttcccacaaacctcccccccaactacctttcccagcctctgataaccatccttatactccatatgtccatgagtttgttttgattttagattccacaaataagtaagaacatgtaacatttgtctttctgcgcctggcttatttcacttaatataatgatccataatgttccatcagtgttactgacaatgactggatcttgttctttgttacagctgaatagtcctccattgtgtatatgtaccacattttctttatccattcatctgttgatggacactaaggtttcttccacatcttagttttgtaaacagtgctgcaacaaatatgggagtgcagatatgtatttgacatactgatttccttcatttttggtatagacccagcagtaggattgctagatcatatggtagctcaacttttagtttattgagaaacatccaaactgttcaccttggtggttttattaatttacattcccaggagcagtgtacaagtgttcccttttctctgcatccctgctagcatttgttactgcctgtcttttgcatacaagtcatataaactgtggtgagatgatatctcattgtagttttgatttgcatttctctgatgatcggtgatattgagcaccttttcttatacctgtttgccatttgtaggtcttctttcgagaaatatctattcaaatcttttgccccctttttttaaaccaggttattagattgtttcttaaagagttgtttgagctttttatatattctgattattaatcctttgttggatgagtagtttgcaaatattttctcccattctgtggattgtctcttaactttgttgattgtatcattttctgtgcagaagcattttaacttaatgtgatccatttgtccatttttgctttggttgcctgtgcttgtcgggtattgctcaagatatttttgcccagaccaatgtcctggagatttttttatagtttgaggtactagctttacatctttaatcaactttgattttacttttgtattcggtgatagatactagtctgttttcattcttctgcatatggatatccagttttttcaacaccatttcccaccagtgtatgttcttggcacctttgtcaaaaatgagttcactgtaggtatatagatttgttactgggttctctattgtgttccattgatctatgggtctctttttatgccagtaccctactcttttggttactataattctgtagtataatatgaagtcagataatataattcctccacttttatttatttatttatttttgcttaggatagtattatttcttatactgaaagcattctatgttatttattattaggctaattttgtagtttacaatgctatcctcttttacaaagctgtgatcaactcaaagtccagatcagggtcaattgtagctatttgcaaaagtagcaatattctggctgggtgtggtggctcatgcctataatcccagcactttgtgaggccaagacaggcaggtcacctgaggtcagaggttcaagaccagcctggccaacatggtgaaaccctgtctccaataaaaatgcaaaaattagccaggaatgatggcagatgcctgtaatcccagctactcaggaggctgaggcaggaaaatcacttgaacccgtgaggtggaggttgcagtgagcccagaatgcaccattgcactccagcctgggtaaccaagtgtgactctgtctcaaaaaagaaaaaaagcactatactgtgtaattattgacagcataattcactattatgtggatcagagagcagaggattctgaatgcatgaacatatctttaacatttcaatacattactcataattactaatgaactaaagagaaaccaagaaattatggtggtagttatattgacctggagaaatgtagacacaaaagaatggtaagatgagaaatgtgttaacacaggctataagggcatgcaagaataaaaataggggagaaaacaggagagtttttcaagagctttctggtcatgtaagtcaatttgtatcagttaatttttaaaaggtttatttacatgcaataaactgcacatacttcaattgtacattttgataattcttggcatttgtagctctacaaaaccaacaacatattaaaatagcaaacatacccattacctttaccaccaaagtttccttgtgctttttctactcactttttcctgcctatccccattccatccacaggcaaccactgatccacttccagtcactatccatgagtttttatttccaaatacataaaatcatagggtacgtatactttctgatcactcagcatcactatttttgagatttattcatgttgctacatctatcaattgttctgttcttactagggagtattatttcattatatacagataccatagtaagtttataaatcacaaattcacctgtccatggatatttgaactgttttcaggttttggctgttgcaagtaaagctgctatgaagattcatgtaaaatcctttgaatggtcatatgctcttaggttttcatctctaccggaagtggaatagatagctatatggctatcatgtctgtaatatgcaaacacaaagcctgacaaaactgatttctaaagtggaaattccactgaagaaccttgactccaacctggcttttgagattatctcctatgtctggtgcaatgattggtcctggggtagccacatgacccaagggggaccatgtttaaacttctgagttttcactgagattaacatgcatttgttgaaagagaaaccccttttcccctactcccccagctgcaaatgctttcagggattacatcatgttggaacatttggttacagtgtttcctaaactttgagggtaaaaattgttcaagtaggtaaaaatggagcacatacaaagaaaaaaggagtccagaaatatcaaataaagaaagggcctccataaaatcatttgaacttatgattaattcattagtcattaaaataagtttagtgtacaaagaatcatccccccaaccaccctttattccttcaccaggtttaagttacattttttaacttgcaaacaaaagatttgtcattaacttagacatcaaaatcccttgtctccaagagcaatcattcaactctgtccctctcattattacaataatatgttcactttattctgcatacacctgctctttgcccttgtctccctattctattctgttaaagttatatccagacatttatttcattttatatcaaagaaactgtatacatgtttttaatcttagaaaaatttctgagtaatcttttgtctcatattcgattctaagccacccaagaagcattattttttcatttagcattttaacttttctaacccaggacttttatagtagatattatgtctttttctaaatgtcctgcttcaatttacattttaaatctaatttttaaaaagtgtatgttttgaatattagcatcatgcatctcaggcctaaatatcccttgataacaaatattgtctttttttctctacgtttttcacatatttcaatagggagatatattgcctgcaacaataaaagtttttgtcaatataacataacacataggcaaaatattgtttccaagtgattgatgatgtggtgccttcagtctagtcccaacccctcaatgtaatcatccctaaatctaatgaaatatgaaataaatatttcattttgtttctaaaattcagcagaaaaatatatagcctgtcacatatagcctgtaacaccaacatataaaaatgaaagcagttccttctccactcccactgcttcacttgactagccttaaaaaataataataataaaaaataaaagcaaaattgttcctttacttatctttgaaatctaatgggtatactatcagaaaagctcttatatatatggagggcctctataaaatatagactcttaactagaaaagtagacttatatgatagttaaatttaaaacacaattgtatatggtaccttcccaaatgcaccagtacttatttcagaatgcatgatgtaattgactaaaccatttagggctagacctctgaaataaaaggcattcacactttgtgattcctggggaaaatattattcaaaatagaaacatgcagaacctttacctgatcgtgataaaaaaatgttcctacttgttaatatgccacagcttttacaaggtcagcaaaaagagattatcccataatataagctgatggccgaaattatctgccttactttagttactataatatctattaagtgtaaatttcttttgaaagaaaacagatacatttttctcagaaatgtctttagatgaagatctagcacatctgtgtttctcactttttaaaatgttgattttattgataaataaatatatatagggtacaatgtggtacgatacatgtaaatattgtgaaatggacaaattaggctaaaaaacatatccttcacctcagatatttattacattatggtgaaacatttaaaatgtactattttagcacttttaagatatgcactacattataagtgactgcagtcactttgctgtgcaccatatcaccagaatgtctttctcctaactgaagcattatcccattgaatatttcccctttttccacccctgccccccaccctgctcagcctctgataaaccaccattctactcttaacttctatgagtgcacagttttggatttcacatataagtgatattaagagatatttgtctttctgtgtctggcttattttacttagcataatgtcctctaaatccatccatgtttttgcaaatgacagaatttcattcatttataaagataagctgtatttttgtatgcatcctacatatacttttaactttccacagctttattgagatataatttatacattgtgtaattcactcatttaaagtacaaacttcaaattcttttagtatattaactggatggacaaataatcatcataatataattttagaacattttaattctccttaaaagagacttgcacccattagcaatcttccccattttctccagccttttttaaacccctcctagtctaggcaaccactcgtctactttctgactatgaatttgcctattctggacatttcacataaatggaatcataataacacatagtcactttttactcacatctttcacttaacgtatttttaatgttcatccattttggagcatgcattaacagttttttaccttttcttgctaaataagattctgttttatggacacaccacattttatttatccactcctcggctgatgaacatttctgttgttttctactttgtgttgctataaacatttgtgtactactgtttgtgtagcatttgttttattttctttttggtaaacacacagaagtggaattgctgggtcatgtgataactctatgtttaaccatttgaagaactgccagactgttttacattttaaagtctcaccagtggtgtagaagggttccaatttttccacatatttttatccattcttcagttgataagcacttaggttgtttctaattcatgggtattatgaataatgctgcaacgaacatgaaattgcagatgtctctttttgacatacggattgaaattcctttggacatatatccagaagtgggattgatggatcatagggtaaatatacttacaatttcttgaggaaacttcatactgttttccaagatggctgtactaatttccattcctaccaacagtgtacagggtttctttttctccacatcctcatcaacacttatcttccgtctctttttataatagccttagtaaaatgtgtgaggtgatatctcattgtggctttgatttgcatttctctgataattagaaatgtttttgattttttcatgtacctgttggccttttgtatgccttaggaaatgtctattctggttctttgcttatttttttaataagcatagttttattcttatttttgagtaggttgagttacttatatattattatatgagccctttatctgatgtatggtttaaaaatgttatcccatttgtgggttctcttcattctattatcgcttcttttcctgtggaaaagctttttagttttatgcaatctcattcgtgtgtttttgcttttgttgcctgtgcttttggaataatctacagaaaatcatagctcaggccaatgtcatacagtcttcttctatatttccttgtagtagttttacatttaagtctttaattttgatttgatacttgtataaagagcaaaaggaaagtcaaattttattcttctgtatgtggatattcagttttttctataccatttattgaaaataattttctttcttcattgtgtatttttagtcattttatcaaaaaatcagttgaccacagacacacggacttatttacgggttctatatccctttgcactgttctacctgtctgtttttatgccactgctatgttgttttaattactatggctttgtaatatagtttggaattgggtagtctgatacctccagctttgttctttttgttcaagattgctttggttagtcggggtcttttgtggttccatacaaattttagcagtaatttttctatttcggggaatttgatagtggttgcatttaatctgtagattgctttgggtagcattgacacttttacaatactaatttttgaatccatcaataaaggatgtttctccatttatttatgccattttaatttttttcatcaatgtgctatagttttcagtgtgcaaatctttcacattcttgattaaatttactcctaagtcttttatatatttttatatctgttttgattctattataaattgaattgccttattactttatttttcaggtaatagtttgtcattagtgtatagaaacaataatgctagctgtatgttgattttgtaactattaactttattgaatttctttatcagctttaaccatttattttggtggagtctttaagattttctctatcttgagtgcgcgaggcgcggggagcctaggacctggagcgagagccgcctacctgcagccgccgcccacggcacggcagccaccatggcgttcctgctgcgcttcgtgctcctgtgcggagtcgcggatttcaccagaagtttgagtatcactactcctgagcagatgattgaaaaagccaaaggggaaactacctatctgccatgcaaattatacttagtcctgaagaccagggaccactggacattgagtggctgatatcaccagctgataatcagaagatggatcaagtgatgattttatattctggaaacaaaatttatgatgattactatccagaactgaaaggccgagtacattttaagagaaatgatctcaaatctggtgatgcttcaataaatgtaacgaatttacagctgtcagatattggcacagatcagtgcaaagtgaaaaaagctcctggtgttgcaaataagaagattcagctggtagttcttgttaagccttcaggtacaagatgttatgttgatggatcagaagaaattggaagtgactttaaactaaaatgtgaaccaaaagaaggttcacttccattacagtatgagtggcaaaaattgtctgactcacagaaaatgcccacttcatggttagcagaaatgacttcatctgttatatctgtaaaaaaaatgcttcttctgagtactctgggacatacagctgtacatcagaaacggagtgggctctgatcagtgcctgttgcgtgtaaacgttgtccctccttcaaataaagctggactaattgcaggagccattataggaactttgcttgctctagtgctcattggtcttatcatcttttgctgtcgtaaaaagcgcagagaagaaaaatacgaaaagtaagttcatcacgatatcagggaagatgtgccgcctccaaagagccgtacgtccgctgccagaagctgcataggcagtaatcattcatccctgggatccatgtctccttccaacatggaaggatattccaagactcagtataaacaagtaccgagtgaagactttgaacgcactcctcagagtccgactctcccacctgctaaggtagctgcccctaatctaagtcgaatgggcgtgattcctgtgatgattcccgcacagagcaaggatgggtctatagtatagagcctccatacgtctcatctgtgctctccgtgttcctttccttttttgatatatgaaaacctattctggtctaaattttgttactagcctcaaaatgtatccaaaaataagttaatcaggagctgtaaggaatatatttttttaaatttttctttggttatatcgaaatagttacaggcattaaagttagtaaagacaagtttaccatcggaaaaagctggattttctttaagaggttgattataaaggtttctaaatttatcagtacctaagtaagatgtagcactttgaatatgaaatcataagtgaagacattggtgaacttacttgcataccaagttgatacttgagtaaccatctgaaagtggtacttgataatttttaccattatttttaggatgtgtatctcatttatttatggcccactagtctcccccaaattagtacagaaacatccatgacaaaattacacatgtgtgtttgtacttgttttcacagctccttggaaaactctgtgttaggaatatctctaaaaacatagaaaactctacagtggtttagaaattactaattttacttctaagtcattcataaaccttgtctatgaaatgatttcttaaatatttagttgatagactgctacaggtaatagggacttagcaagctcttttatatgctaaaggagcatctatcagattaagttagaacatttgctgtcagccacatattgagatgacactaggtgcaatagcagggatagattttgttggtgagtggtctcatgccttgagatctgtggtggtctttaaaatggtggccagccagatcaaggatgtagtatctcatagttccggactaaatactggctttccactttaggtgatatttttcttattagaaaaatattataactcatttattgtttgacagttatagattgaaatttcctaattctaaattttaagtggttcttcagtttcagtgctttatgttgtttgttgttggtttggcatggcattacatattatatgttctagaaacatgtaatcctaaatttaccctcttgaatatgatcccttgatgatatttttatcataaatgcagaataatcaaatatattttaagcaagtaagtgtcctccatcaattctgtattccagacgtgggaggatgtacagttgctgttgtgtgatcaagcatgtctctgtgtagttccagcaaatcaagctgagctttgaaaaagtttgagtcttagttttgtgaaagtggtttattctcaaaaaaaaaagaaaaagaaaaagaaaaagaaaaaaagataagaagaaggagtaaagggactacttctccttgccaaatgtgctaaatatcattttaggagaagaaagtggatttattgtatttcccttaagattgtgagggagtgtggatacagtagaatgagccaacagtttctttataataaatacggtctgcaataaattatttcactagctgtaaaacctttccctagattttagtagggagttggtttctgttaatatctttgggtgctgtggtggtaaatgctacattataaacagtggcatgtatttacagttagagtattgtgtgtacactttttaatggtaaacttaagctgaatgtgtaatggatttgtctatagttttacatatttggaagcattttaaaataggttttaatcttacataaaattacttttatacttgtgttaacattttcttctgtgccttttgggtaatttaatttctgttatgaatttctggtgcctatgagctagctatcacctacctgaaaggtgcttagaggtgaaggtactgtttctaaaaacacatcactgtgacacctttctatcctcacattttcaagcttgcctcttttctgttctttgtggatataacgtaagtgattgtgttattcataaagatttagaaatttcaatattcccaacactctgactatgtttctgattttataatagtagccatttttgaatgtcagatgtttggcctgttttatatgaataaagtttatttataaaatattataaaaataagtaaacagaacattaataataaaaaagattttctgtatcttaagattatattttcagaaaacagaaacaatcttacctcttccttccctatatggatttcttttatttctttgtcttgtgtaattgatctggctaggcaattacacataatgttttcagcatttgtaattttacatcaaatccatccattgtaacacattgattgctacttttcaacttgtaaacctggacatttgtcactactcttcctccagtacaggagtccatggcgcggtgtgggccctgctgtgccacagtccagggcacggctgggcgcaggttctctcctgcaagagtccgcggctctgcagagcaagagttctccagtgccttagtccagggtgaggcaggggtgaggctccttcagtagctcagtccaggacgcagccctgcgagggtcctcctgtgcaggagtacacgatgctgcggggtcctactgtgccttagtccaggacgccagggggctgggtcctctgctgccatagtccagggcgcgaggggctgggtcctctggtgccatagtccatgacgcagggaggctgggtcctctggtgccatagtccaggatgcgaggggctgggtcctctgctgccatagtccagggcccgagggggctgggtcctctggtgccttagtccatgacgcagggaggctgggtcctctgctgccatagtccaggatgcgaggggctgggtcctctgctgccatagtccagggcgcgaggggctgggtcctctggtgccatagtccatgacgcagggaggctgggtcctctggtgccatagtccaggatgcgagaggctgggtcctctggcgccatagtccaagacgccagggggctgggtcctctggtgccttagtcccggtcgcggggagctgggtcctctggtgccatagtccagggtgcggtggaacaggagtcctgcggagcagtagtccagggcgcgctggggcgtggatcctcaggtgccacagtccagagcgcgacagggcgggattcctgccttgctatatccaaggtgcagcggggcgggggttctcttgttcaggagtccaggacgtggcagagccggagtcctccgtgtaggagtcctccggtgctggagtccagagcacagtgaggctgggtcctcccgtgccatagtgtagggcatggcgggacagggatcctgccctgcgatagtccagtgcttgagtccgcagtaaggcaatggtcctccaatgctggagttcacggcgttgtggggtcggggtcctttggtgacttagtccagggcgtaccagggcgggggtccacagttgccatagtgaggatcttggaggaaggtggttcctgccttgctgtagtccggggagcagggggcaggggtcctctcttgtcagagtctctggcgcggggtgggggtggaggtgggggttttcctatgcgatagcccacgggtcggtgaagccgggtcctcccgtgcctttgtccagggcgcaggggggcgagggtcttcggtggtggagtccgcggagcggcaggacgggggtcctccagtgccatattccagggcgcggcggagtgggggacctgtcctgcagtggtccagggcatgtgggagtggtggtcctgctgtgcctcagtccagtgcgcggtgggacggcggtcctgctgtgctgtagtgcaggacgcggtggcgcaggggtagtccagagagcgccgtggcagggggtcctccagtgctggaatccagtgcaaggcgggtcaggggtcttaccgtgccgaagtcggtggcaagggtcctcccgtgccatagtctagggggcgacggggcaggtttctctagtgcaggtgtccagggtgtggcagggcaggagtcctcttgtgcaggagtccaggacgtagccgaggagtcctccaatgtcagagtccagggctctgcggggccgggttcccccatgccagagtgtagggcgcgttcaggtgagggtcttggcgtgcagtaatccagggtgcggtggggcaggggtagtccagacctccatggcgggcgtccctctgtgcaggagcccagtgcctggcggatcgggggtccttctgtgctgtagtccagggcaccgcaaggtgtgggtcctctggtgccctagtccagggggcggcgagtcagaggttctcccgtgtctcagtctagggcctggtaggactggggtcctggagtccacgtggtagcccaagttgccgcaggaccaggtagtctggaaccacagtccagggcgctgaggggcaggagtagttcagggcgagccggggcccaggtcctcgggagccagagtccagggtgtggaggggtgggggttctgcagtggcacagtccaggacaccgcggggcgggacagggcggggatcctcccgtgccttagtccagggctgagccgcgggagaggtccttcagtagcacagtctagcgcacggcgttgcaggtgtcctccagtgcctgaggccacggcaggtcgcgggtcccactgtgctctagttcagggcggagtgggtctgaggtcttctcctgcctcagtctagggcgctggagagcggggatcctctggtaccggagtcaatggatccacgggtccgggtcctcccatgttttagccccgggaggggagaggcgggggtcttcctttgccctagtccaaggcattgtgaggccccgctcctgcattcttaactgtctgtgcctctgccgccgcggggtaaaactgcaccatctcaggcaagcctaacagagcagctgtccttaaaagattcccagttgagtgtggttcggagcaggcctgagaagtgtgcccttagttggcttcaagggctctgggcagtgtttaaggaatccagctgacctcagttactccaagcccttttccacttgttttcttcaggcctcctttctttgtgccagcatcaatgggtttttggttaaagttttcagcagctgcctgcagttccatttttcttaccaggtaagagacatagcttcatgaaaacaaagggagaaggcttgtgaccagagaactcccagtcctctccctgcataggaaaactggacttctccggagggctccagctcctgggcaaatctctagggccacttaattgggctgtcccccacctttgtttctggttttggaggggccaaggttgggaatcctttctaagtctctacacatggagcccttctttggtgggatagtcttgacatataccaggattctcattgacctttcagagccttcaagaatcctgagctgctttggcttctgttcctggaagagatgcaactgaactgctctggagctggagttcaggttcaaatattcatcactgttactaagcctttacatagcatgtgatttctttccggcaggctcatggtcacttaggtttgcttgtatgtagatggagggtctgcatcctcattcaggtaacaccctcagcctttcatgctgagattagccattttatttgtaactcactgtacaatccatttgctcttccagtgtcccttagaaggatgcagagtgttctgtagaatgccatagagacctggatttagggaaaatatttgaccaaaagtctgccaactcacatgagtatctcccaacaacttgtacagtgctagtctctgggtatatagcaaatgaaaccgtgcctgagcagatgttacaaacaccctcccctgagagactccagggctgctttattcaagcaaaacggtgtgctctaataagctcagtgttgagaggaacaagttttcattccagctttctcaaaaactccctttgtgactttagacataataataataacactacctaggtagtgaacacctctgccaagaaatatcatgatcattacctgagttgtaattctcacagtagtcctgcaggacagctgctgttactgcttattatgcagatgggcaacctgaggctcagatggagttaagtggcttaattggtagcaacagagccaggatttgaacccagggctgcctgatcaccaaataaaattgtactcaacatgatgcacttaacttttctggcctcatttctctcacctgtaaaaatgcaggtttcagatgttggtaatattttacctgtggttgaaagagttaccagcccttccttgatcacccatggtaagacccatgagcctctgaatataattatagaaaacatttggagagggatagagagagacaagatcatgcctcctttgataatgtcaaattttcagtgcacgaagccatacatagtgcagttttctagcttccctttcacacatggcattgaagaaagtaaattaagcaactcagctaacactgggaatgcagcagaagtaatcgagttcagtgctgggagacagttgccatgatattccaacatggacaccaggatcacagtcaatgactatgccctcccttgaagatggtggcttgcctctctttctgtaagcacatgtcatgtcataacaatattaaacaattgaaagtaatgtccccatcttcttctacactgcctttgaattattattttagatctgccaaaataaattgcaaactcattaacaagaaagggggagtgcatgcatccctgccttcccgagtagtctattcacccaaagacaaaagggtgaccagcctccatctgggatattcaaagacacagtcaccttgccatgcagcctgaggccaatcccctttttaagaagcttgttagatgagctccttaaacatacaaccacaaaggaaaagcacagctggtgtgagcgaggctgataaaatgggcattttgtctgcttcaaggttagaatgcaacttgtctatcaaaatgtggttatctgacctccacaatgctgcagtccagctaaatcatgcaaatattcatccaccatttactatggataaaacaataatgtgctgtggggaatccaattacacacacacacacaaaagtgcacacacacatgcatgcacacacactgctcctgctgtctcagaggttccaggctggcaaggaagaagtgcaaacattagtaggtaagtccactagcaggaggaatgtgataagtagatccaacagggtacaacacagtatgatagaagcaaacaaggtagaaatgagttctgactccctttcacttatgaaactgattatggaatagtgtatgaaaggcttgcctgaatgaatctcatattttccaagtgttttctatcccagcgattggaactttcattcatttataccattgtccaaaaggaaaatacaggagattttcctaagaccatcctctgtcttatcgctcatatcatatccccaaacatcaccaagccctgcccacttttacctactcagtttctctccagttgttctgttttctccatatgcactagtggtaccttggctacatgaagaccaccagcagcagctgggacaaccagcaccctgtggaactgcacagcatgcatagaatacgtcctcccttcagttggcttgggtcagcttaggtcatgggccacttggactgatagcagtttccacagaaatgcctcaagatggtagaataatccagatctctttgcatggggcatggtgtggctatctgagaaaatcctggcttttataggaaggagaaagaagaatgcttcttgaggggaagaaaccaacaggaatgtgcctcagggaaatgtcaccagaggagagtgagctgtaataagtattttggcagattgcatgtttcttgtgttccttggccctgcacagagctaccgtttactcatttgacaaatatttgagtagtagactccagggttcaatagtgagcaaacatgcacagaatttcttctctagtggagctgagagtctaacagaaagagctgacattagtcacagaattatgtaataagggaaagttcagcagacccaggggtgctacaagagcctgggaaggcggactgaccccaagagggaggcaggaaaggttgcccccaggaagtagcacttgagctacaatcagggagaaaactaggcaaagacacagcattcaggagaaggtagaagttggcccatgaggatggtggtgtggagaggtgaaccaatacccaggtcttggatttattgttgagctgctgaattaaccagtgctggctctctcccaacctctgcacttcttttttgcaaggttatatatttttttatttaaaagctagtatgagttgggatctgttgcttttctgagaccccatcctgtgaggtaaacagggggcctcactgtactctggggaagctaaagatggagaacagttttagagtgcctggagaagaggccctttaatagatcatttaagaagagggtgctaccgctagactgcccagattcactttctggctttgtgaccttgggctctctgtgtctgttttccaatctgaaaaatgaaataatgatagtatctgcctctgcctgcaagaccctgacccatcagaccaactaccttttcactagaactctcttcctgcactgtaccccaactggaccctcattaacacttaaaatgggcatgtttcccttttctagattttgctcaagacatttccctcatcagaattaactttggtccatctccctctattgaaattcaacccattctccagaaatcagttcaaattttatcaccagaaagcctctctcaattataccaagcctcttttatactttgtgccatttctgccatgatttcttatgttttcctttttcactacatattggtataggtacatatgatctccacttccactcaaatgtgaggttactgagggcaatccctatgggtatagtcatatcccaagagtcctgggcagagggtgtccctctttcacccaggttggagtgcagtggtgcgaccagagcttactgcagccttgacctcctgggttcaaatgatcctctcaccttagcctttccagtagctggtactaaaaagtgggcaccaccatgcttggctaattttcatatttttcatagagatggggttccaccacgttgccttgcttggtctcaaagttctgagctcaagcaatccacctgcctcggcctctcaacatcctggaatgacagcatgagctaccacacctggccaaatgccgaatactttagtcatatatgcctgacacttccagggcatgcagaactgcctcgcttacttttcttttgacacagttaataaattttcttaatttaaattttaatttcaacatgtatacatctttgaaataaataaaataatctctttgaatgtttggcataatgtagaagaaattgacaaatggatatctttacttcattttccatctcaaaatgtggtagaaatatgctcccctaaagtgatcccaattattacatagccatcttgctgtggttaatgtagaatctttttgcaatatcacattcatgacagggcacatccaagaaacatttaagtgaagataatactagattcttgaaagtatctagacacttaagagcaggtagtgatgatgttaattaacagtaacaatgtcgagggactggcttttgcccttccctaataaacataaacagcatagaaactcagcaaatttgctcttattttcttcattatttggttgttgaatcagtaaatgctttccacaggggtcatcttgttagtcatcttgtcattttgctgtgtcccttcttcatccttgcactttttcctttctctcattttggcatgtattgagaggagtgttatgttgatggaatgccctatcctgacttgccatctgattagaacttccctcaatttttaaaatgcttcttgaaatggtttggatttgtgcaccccccatccccaatctcatgtggaattgtaattgccagtgttggaggagaggcttagtggaaggtgtttgcatcatggaggtggtttctaatggtttagcctcatcaccctagtgctgtctgatgataaagttctcccaagatctgcttgtttaaaaagtgtgtagcacctcccctgactcgtttcagccatgtgaatatgtgcttgcttccttttcacctctgccatgatcgtaagtttcctgaggcctccctataagcataagtctgtacagcccacagaactgtgagccaattcaatctcttttctttttcaattacccattctcaggtatgtctttatatcagtgtgagacagactaatacactcctcctcagaaagcattcaatttagctgtgtctaaaggtatgccagctgtcctggggcattatcttagccaatcattcttcctcttcagcaagatctatttgcctatcacagcttgacctgcagttcctgccatacttgtcagtaacaagtagcctataatatctggagggatttcattgaaatcacagaggttccttggctctttactttattaacaggcattaggaaagcacatcgactttcttatttaataaaatgcctgttgctttgaaaaattgctcaaaagaagaaaagagagggttacttaaagatatcactataggcatggcatgctggtccacacctgtaatccaagtactttgggaggctgaggagagaggatcacttgagtccagaagttcaataccagcctaggtgacatggcaaaaccccatctttacaaaacaaaacaaaatagaaaaaatattcaggcacagtggcatgtgcttgtattctcagttactcaggagactgaagtgggagaatcactgagcccagggaggttgaggctgcagtgagccatgatcgtgctgcccctctccaatctgggtgacagagcaagaccctgtctcaaaaaaaaaaaaaaaaaaaaaaaaaaaggctatcactatactatctataactattcttaattaggataactaggtattttccaacagtggaaactccaaacagactaaattgttgtacatcaaggtgaattgtcatagttaattcctttgcttgcaactgtccaataaatggatgaggactcacttcaccaataaataagaaatgtgaacagcacatggggcctgtagatgccttttgcagggccctctttttctcttcctaaagttgcaatttgcgtgtttctgtagatgggcacatcatagaaactgtcatcctagatcagagcctggagagagagatacaagtgtcatgcttacatatgcagagtgggaacaagcccagagaaatcaagatgattaagcagaaagtttccatactgaagataaaccagctgtgtaaaaaatcatgcttattgaacaaaaaagcattgcacagctgaaataactgctttaactaagaagtgaagaactgacacctgaacagagcacagatagccacacagacaggagctgcatttcaaacaaggtcattgctgttgtccccactccaaattaagtgtctctgcttcacccttccttaccaaagttctgcttgatcatccttttgttttgttttgttttgttttttgtacttcacttctttgagaaaatataaaccaaaattttacatgaaacaggaattcagcttttgacaatgttagccattgaaacaacaacaaaaaaagtttctattatttctcatctctgtgctatccagtgcagtagccaatagccacaggtgactattaaaattaaaattaattcaaataaaacaaaatttaacattagctggtcagttgtactagccacatctcaattactcaatagccacatgtggctagtggctactgaactaggcagcatgaatgtagaacattttcatcatcatagctttctaggtcatggaaaaattgcagaactcaatttccagtgtgcacatttatttgcatgcctaggagctttctgaccctgtgttgagctgcctaaccagcttcctgattgacctcctgatatttctgcaaatgtggactaagaggccaggagtcctcagggcccaggtgactcaggttattcagtaattatgtttggactagcaggcctctacttaatttgggatgcaaaaggggacttctcttcctaattgctaaaatagcttttcaaggttcacctctcatcgtggtaagagtctcatttcctgagactcttatttctttccatgacttatgttatattctggagagagtggattcacatggaaaagctggctctgtgctggctttccaggggtcagccctcttgtgagtgacaagtctgcctatttacatgatgtacattgtgtcccactactggtaatagaagctcagcagctgattgactgttaggttattttcaaagctcaatattcacaataatctaacagacacccacacaaccacaaagacagacaaggctctcataacctgcaaaagacaaggtgcacatttcttctttccatcccagcaacaaattgccaacccagccagcacttaagttggggtaaaaattaattaaaagaagaatctaccaatgtagataaaagaacaaaaaagctattgcagctgtcttctccataacagaggcctgtgatttgaattttaatgtttcaatctactttctgctcttgtgtttattttattatttattttttgtcactatctcttatttgtagatacaaatttttcacatttaaaagctattttaaatataatctttaaaaggagaaacattattttttttaattgcacaaaatactgaaggtgagttccactgattggaatgcaaaatgggacaatatctctggaagcaattttatccagataaatcaatagctttaaaacaattcaaaaccttggacctaatacctctacttctaggaagctagcctatgaaggtttctgctgaaggatgtttatcacagtattatttataatgcaaaaaagccaaagaggagacctgaaatgtttcaaagatgaaaatggtttgataaacaacatttttttagacggggtctcactctgttgcccaggctggggtgcagtgccacgatcttagctcactgcaaaatccatctcccaggttcaagcaattctcctgtctcagcctcccaagtggctgggaatacaggcacaccccaccaagcctcactatttttttgtattttagtagagatggggtttccctgtgttgcctaggctggactcaaactcctaagcttaggcaatccatctgtcttgaactcccaaaatgctgggattagaggcgtgagccactacacctggcaataaacaacatatttaaacactagaatattatgcaaaaattccaggcatgctttggaaaaactattaatcccacaaaagatgcttatgttattatacagactaagagaccaagattctccaggacacttactgtgttacatgtctgaagtacaatataatgctgtatataaaatgtgacctcaactcaggccccagtcttttcatctggaaaattctattaattatactgcccttcccctttttagattttctgtaggagttaaatacaatacactttgtcaattgcttaacaccatgctcaacactggtcagagagatataaatgtcagctattgtactatgtgccaaaaaaaaaaaacaaaaaaccacacagacagacacacacacacacacacaaagacacacatggagggagaggaagtaaagattagaaagcagcacataatgttatggtaggcaatgggaccactaatgattttcatattcttttttattttcttctttatactgcttacatttttcagtgtatacaatgagcatgtattacttctgtaaccagaagaatgtggtataaacctcaccttaatataataaaacaaaattactggccaggcacggtgtctcatgcctgtaatcctagcacattagaaagctgagactagtaaacctcttgagctcaagaatttgaaaccaacctgagcaatatagtgagaccttgtgtctgcaaaaaatgcaaaaattagccaaccatagtggtatagaactgtagtcctaagttacttgggaggctgaggtgggagggtggcttgagaccaggaggtggctgcagtgagctgtgattgcaccactgcactccagcctgggtgaaaaagccagacccagtcttatacaaaaatataaacaaatatacaaaatatacaaaaataaaaacaaacaaacaaaaaagttattacttagatcccacatgctgtcttggagccattgtagcattgcgggattcaagagactggagagaccaatggatgagacaggaggattttattaaagtggccactggcctagtggattcgcatccaaaaggctgagctccgaacaaagatggggcctggtttttaagcatgcagctgcgtgaaactcacagggcgggatggcaagcttatagaagcagaacaaaggcagttaatcaaacagtgacaggtgtatgactcaaacatgcctggtgacctctgctgggctgcccagcaggctctcagtggatggtcactattttaggcttgctcaggcatgtcttgtgaccttctcagtgttgcacagatggaaaacaggaacttacaaaatccttacaaacttacagaaatagttacaaaaataattatgagagcagagcaaagacatactggcctaggaaagaatctcaaagggggaagctgataagaagaacttatttttctcatccccgttcctggagtccgttccttctgtgctctgcttgaccttgtacataaagttagcttagtcctagcagggccttggagtgagtcagcctggtacaggcaggaatttaggtttttctccttttaatttctgcttttgtaagccagggttctgattgtcactgctgagaaagtaaagtgtgttcaggctgtccatggttctgggctcccttgggtctctgaggaggattgtcccctccatcacagagaatatcaggacactagcctgttcctagttatacttacacactcttctcatgttgtctatggagtggaggctgcagggagggtgacatcctagttagtcccaagtgccagactgcctgaagctcactgttaacaagtcctgccttggagaagaaggaagggtgtctttgtgaacctcccacctgggccaaagggaggccactctctcctctgcttctccccaaccttggtcttctgcactcctagtgaacctctcaccccctgcctacaggcctggaatctcaagaccatgatggcctctcatcacccctgaatccagagctttccctttacaaagggaaaactgagacctggagcagggctgatgttcagccagtgcacaagggaatagatgaattggtggtgaaatactgaaatagttccagggtggatggaaaggggccgctgccctgaacatctctaccccccacctcagcccatcctccaggaccctgggtcagcaccaggagcatcaaagtggccaggattggctgaagcccatgctaatggctctgccagctcttctccccactagagagggcaggggaattcaggccatctggaggtagcgctgtgaccgtgtatgcagtagtcaaaccttgtgtgccaccatccctgactttgttgataagggcatcaggctacatccctctggtactcagtggtaagcatctaaaatcttaaagaaaaaatttaaaaagctttcaaaatataggacttaatatataagcctgcataaacatctctttagcagttgtccaactggtgcttctggttctgcctccccagagagtggatgacctgggccaccctccaccactgccccgtaaggccactggacacgcagcccatcagttctcttcacgtggtcatccccctttagatgggagaaaatacacctgcctcatttttgtaccttctgtgtggacattccatgacagagcttcactaaatgtatgatgaagaactgaatgaatgaatgaatgaatgaatgaatatgagagcaaatgaatgaatggctcagatcctgggctggaaggctgtgtatgaggatggtgggtagaggagggtctgtttttcttgcctttaagtcattacttgtcattttggggcaggagcacaggctttgaatgccgactgactggactttaatcctggctttactagctgtgattgtgtgacctcgtacatgttacttaaaccctctgtgcctgtttctttatctgtaaaatggagacaataagatgacaaaggactgtggtaagaattaaatgctttaaaaaaatcgcagtttgtattaagtcctcaatagattgggtttagcatcatgagtgcatgtgtttctgcagcaatgctcatcttgggctggatggtacctacacagagaaagactctggcctcttctcacccacatgtatctgtcttatgcctggttcccattcccagatccttggaagatccatattgctgaaatggtgaagggtgatgggcacctcaggacaactaagcggctccccaaacatcttccccctcccaaactctcctgtggtctttagcatttaacaggaatctctcgacactctcaaggggtgatcttctcatggaagaccagtggggaggaggctgcaggaaaggtcaggcactgtgcacttacttccctgacagctgcaagtggttctgtttccaagcccatgggtcactatgaataaggcaagttatatgacataataatgtgattctttggtgcctcagtccacactggcactttaatactcctagagtggattgcatggtggtctatcaaaagatatgtctacctggaacttgtgaatgtgcctttatttggaaaacaatctgcagatgtaattaaatccagcaccttgagatgagggcatctcatcttggattaggatgggccctaaatccaatgacaagtatccttataagaaaagcggcaggtagggcagagtggctcaaacatataatcccaccactgaggaaggtcaagttgggaggatcgcttgaactccaggcgttcaagacctgcctgggcaacatggtaagaccctgtctctccaaaatatatataaaatataacagccaggcatgatggcacctgcctgtagtcccagctaccagctaatcaggaggctgaggtgacagcataccttgaatctgggagattgaggcttcagtgagctgtgatcatgacactgccctccagcctgggtggcccctggcccctccacaacctgcgctagaagagctgggccctggctctgggcaccatgcagcctctaaggtggggctgagcgccagttcctgccctcctgcagctggggaccaataccctgacttaggcgctgtggaggcttctggcccaagggtccgcactgctggtggcactggcagggtcagagtttgccacagctgctgctgcgcgccttgtgcaggttaccactgcagctgaacctacagcagaagcaggcagggctggtcccagacagcctgggggtctctaagtgcagggccctttcaccctagagtcagctctttcttgccggcacccatagcggggtgtgcaggcgctgggtacagggcagcagccaggaaatggctgagcggcctgttcccgccctcctgcagctggggcctgaccacctgaattagccgctgggcgaggtctggccctgggatccgcctggctggtgtaggagcacggtctggggttgcctccaaggctgctgcgcgcgccatgtgcaggcaagggtttcccagacagcctcagggtcatggagtggaccactgtcccagcctggagtccgctcttcctttgcctgctcccagagttccgggtcgcgggcactgggaactgtgccgccaaggggactgggccgagggcaaaggtttctgccctgctgcagctgcggggctgactgcctgaattaggcgctgaggcggcgttgtccctggtgtcctggctcttggtggtgcaggcaaagtgcccggttgctctgctgctgcggcgccgttgtacaggtggcagctgtagctgagttctcagtaggggccggcagggttggtcctagaaagcgtgaggatcgccgagtgcactgccctcccagcctagggtccactcttccttggcccgagcccagagctcggggtttcaggcgctgggccctgtgcagctgcccagaataggctgagcggcaggttcccgccctggcaagggatccagcagtggaatcctcactgctgttggcggcgggcaaggtcagcggggtttccatcgctgctggtgggagccacctggcggtggtagctgcaagtgagcgcgtggcagagactggcagggctggtcccagacaccctgagggtctctgggtgcatcgccctaccaccctagggtctgctcttccttagcctgctcccaggacgcggtgtacgagggctagactctgagcagcctccaggatggggctgagcagcggattcctgccctgctgcagctacagtctgaattaggcgccaccgcagtatctggccctggggtacgtgctactgggtggcatggacagagatgggggctgccacagctgctatggggctgagcagccgattctcgccctgctgcagcgggcgaccgctgcaatccccagcgctatgggaccgaccacctgacttagatgccttggaggcatccggtcctggggtcttgctgctggtgtctgcgggcagggtcacggctgccactactactgctgtgcgccatgggcaggtgccagctgcagctgagtccgaggcagatgctgtcagggctggtctgaggttgcctaagggtggctgagtgcaccacccttccaccccagggtccgttattcctaggccggctcccagattgcagggttgtgggcgttggacactgtgcagccatgaggatctggttgggtgcagattcccgccctcctgcagctgagaagccaatctcataacaggcgctgcagtgacctctggctctgcggtccgcgctgctgctggagctggcagagaacagagctgccaccgctgctgcttccaggagtgtgcagctggcagctgcagctgagcccgtggcggaggctggaaggccttattccagaagccttgagggtccccgaatgcaccgccctcccaccctaaggtccagtcttccttgcccgcgcccagagagttggattgcaggcgctgagcacagtgcaggtgctgggatggggctaagctgaaagtttccgccctctggctgctgcggggccgacagcctgagttatgcgccgcggcggcttttggtcatgggatccgcactgccggtggcttgcacagggtcgggggctgccacagctgctatagttcaccgtgtgcacgtggcagccgcccctgagcccaccgctgaggctgcagggctggtccggtcccagacggcctgagggccatttgcccgcgcccagatccgggtggctgcgctgggcactgtgcagcctcccggaatccgctgaagggcacgttcccgctctcctacagctgtgggccgactgcctgattttggccactaggtggagtctggctctagggtttcgaggccgctggtgttggtgggcggagtccgggtttgccaccgctgcgctccatgagcaggtagcagctgcagcggagctttagaccgaggctggcagggctggccccagacggcctgagggtcagggagtgcagggtcctcccaccctaggtccgctcttcctttgcccttacccagagcgggttgtgcgggctctgggctctgtgccggcgctgggctctgtgcagccgccgagatggggctgagcagcggatttcctccctgctgcagctggaggacgattacctgcactagccgctgaggcggcatctggccctgggttactgcagctggtgacgcgggcagggtcagggttggttgcaggtggcagctgctgctaaacccattgcgagcctcagggtcaccaagttcaccgtcctttcatcatagtatctgatctttggcccgcgcccagagtgcggactggcctgcgctggggactgcatagcttctgggggccggtcagcgccagtttcacgtcctcctgcagctgcgtggcctaaggtcttaggcgccgcggcgctatctggccctgctgtcgacgctgctggtggtggggacagggtcaagggttgccactgctgctcccgtgcgccatcggcaggtggcagttgcagatgagcccacaattgaggctgttggggctgctcccaggttgttagagggtcgccgagttcaccgacatgccaccctaggttacgctcttggcccgcacccagagcgccgggttacgggtcctgggccctgtgcagccacggggatggtgctgagtgcaggttcccgtcttcctgagatgcggggcgaccactggaattagcctctgtggtggtatctgaccctagggtccgagctgctggtggcgtgggcggggtcgaagtcgcctctgttgctgcggcgtgccatttgcaccgtcctctggtacaggctggtctgtgctgtgcatggtcaatgtagtcttctctgggcattcttcacagatatctgctggcatggctcatcttctctttgattttgcatgtattgtcacccactgatgaagtttctggtcacctgccattttcctctagccaccaagacctcacattctgaggccagcatgtcccaccaggggcctccactggccctgtcaaaccagttgtgagtccccctcccaccaagcttggagagactggcttttcagacagcactcacaagctgagagtaagggaattgatctcttaggcacttccccctgtcctgccactctgtcattcctggaacaccctatgtgcactagagaagtaagacatcagcctgcatattttctcatctttctttaactgtctattttttcctatctatctgtatgagtgagtcccaggaagatgttggggctgaatacctgatcagagacacaggcagagccatagtcacatctcctgggaactttcttcttcctgtgtaattaaaagctcttctcttcctcttgttcatagaaattccccttacactaaacctttgactgaaaccatcccctcagcttgataaaattttagacaggattatttctgattcttggctcctggcctcttttattagcatattttagaaatgttatcattgtaaattctctctctgcctctttgatatataaatctttttaagagcccatctgccagttttacacttcagaaatgtccatttcaaggacctcagagccattcctttgaaatgtaatcctcaagaaagataacaccattatctcccagactccataagagagtaagagccaaattatggtgggcatattgctctgatttgtaaaattaccttctgtcataaagataagatagtttaatgttcctttggaaaaagacaactgtcaaaaacaagtggcctatgatcaccccctcatcccagctcttaaaatctctactgctgtttgtttcagtggagctgagttcagactaagttctggcctctttgtccttttgcaatagccttcaataacagcttttttatgtgtttaactttgtctggtgcaattgttttctttgacactttccaccctaactagaacttccattaaagtcatagtaggattcaaggcagccaaactcgactcacatacgtaaaaaaacttcttaggatgtagaaacccatattctcttcaataaattgtttcttcagaccattgccttattaaaagtttctagttcttattttggcattgaaaagcagaacaccaatttttaaataagtctctgctcacttttaatttctgctataacaattttattgctttccatggctgaacaacgagaagacaagaacacaattttaaattaaattttatttaatttttactattacaattttatttctttctctgactgaaagaagaaaactcgaataaagtagtctagtgtataaagtgaagactagaacaaagaataatgtcttattaatacatttcagaaagttacctccatttaacatcaatggtgtcatttaatattcttaactttcctatcaagtagatgctattattatctctattttataggatattaagtcttatatattatacataaccagctgaaggtcatgtagcatgtagatatgataggaatacaaagaaacaatgacattagaagcagaggagggagaaggattacaaggctaaacctaggtcagttaagagaaaaagaaaaactaggagaagacaaattcttgttagaaaaaaaaaatgattgaggcagagcaagacagtggtgcagacctctccagctatcgtacccctatagaaacatcaatatgaacaactgtccacatgtgaaattaccattacaagagccaacagaacctcaatacatgaacaaggttatgaagcacctttagcctgtgaagatgggtgaaaccatggcttatgcagtgagagaaccaatactctgtgactgtgatactcttccctcaggccgttatggtaccatctgcagaaactcccacagggcttatagtttttacactgaagaaagtgagcaggagtttgatatttgttttttccactatattgagttctttcacagtagcctcactcctgtatcagcccacaagtggcaccatgagtgccaaaagggatgaaccacctgaggcatgttaatgacataagaggaggtggggccagcaacagccaccatgtgaaacataatacacagactctacaggcttgacggcctgacttgttctcccccatagccaggggctccctgtggatcacccatgggcccagccagcaaatgttgcatcagtggagccattggaagacttacgtctaacatgggatttgggctctctctaacgttaaactggaatacgatgataagtccactcaaaatttcttaataggcccacttaaaagtagtcacaagcaaacccagactgagaagactcaaataaacatctaattcatcaatgtgtagacagagatgtatatctacatataataatgatagcttaggaaaagttccctctccaaatggacaaaacaaggtgtcagcaactgaacttaaagacatacagatgaatgatctggcaggcaaataattcaaaatggctgtcttaagaagagcctgaacactgagaagcagagacacaattcagaaatttaccagagaaattcaacaaagaaatcaaaataatgggaaaaatcacatgtaaaccctggagcaggaaagttcaatgaacacattgaaaatccaacggaaggcatcaacagaaggaagaactgatcaagcagaagaaagaaacattgagctcaaacaacaggctctttgaaaatacatggtcagagtaaaatgaaaaaaaagaatgaaaagaaacaaagaaagtttatgagatttgtgggacaccaacaaaagaggaaatctacatatcattggtgttaaagtggaactaagaatgaaaaagagatagtttattcaaagaaataacagaaaactttttaaacctggagaaagattaaaatgtttaggatggtcaaagtgcccaatcatatttaatctgaataagacaaccaaagacatattataattaaactctcaaaggtcaaagacaaagagaagaccctgaaaggactaagaaaaaggaaacaacacataagagaattccattatgcctggcagcagacttctcagcagaagcactacaggccaggagagagtaggataatagattcaagtgctgaattaaaaaaactgtcaaccatgaataaagtatccagcatagctatcatttagaaataaaggagagattgaaacattctcagacaaacaaaaagcaaaggaattcattgtaatcaaacaagccttacaagaaatgctaaatattgttcttcaaactgaaaggaaatggcagcaatatgtagcacaaaaaatctgaaggtataaacccacagatagaagtgaggattcagacaaatttggaatgctctaatatggtaataattggatgtaaaccacttatatatccttagtaggaaggttaaaatacaatacaaataaaataataattacaataatttgttaaggaatagaaatatacaaagatgtaaattaagacatcaaaaatgcaaaatgtgagggagtgatgaagttaaagagtagagtggtttcttttcccctttttttgaatcaaaattaagttgctatctctttaaaataacttactgtaaccataaaatgttctttgcatgccttgtggtaaccacaaagcaaaaacttttaatagatactttaaaaattaaaaaaaaaagaaaccgaaacacactgatagagtaaatcacttaatcacaaaggaagatagtgaaatcaatcaatcaatcaaagtataaatttttaaaaaacatgaaaacaagtaataatatggcaggaccaagtccttgcctatgaataattatcttgtatgtaaatggattatcccatttaagacatataatggctacactgattaaaaacaagacctaactataaactttctacaggaaattcacttcatctgtaaatacacacataaattgaaagtgatcagatggaaaaatatatttcataaatatggaaaccaaaagaaagccggtatagatatatttatatcagataacatatacttcaagcaaaatcctataaaaacagacaaatatggccattatataatgataaaggggtcaatatcacaagataatataattgtaaatatatatgccctctatattgaagcccctaaatatataaaccaaacattaatagatctaacaggagaaacagcaagcaataaaataatagtaagaaatctaaacattccactttcagcaataaacagattatcaagacagaagatcaacaaagaaacatcatatttaaaatgaactctagaccaaataacttagtagtcatttacagaacatgttatccaacaattgcataattcacagtcttctctactgcgcatggaacattttccatgatggatcatatattaggcacaaaatgagccttagcaaattcaaaaaagatcaaaattatatcacgtcttttctgacaatatagaataaaactagaaataaacaacaagaacttcagaaattgtgcaaatacatacaaattaaacaatgtgtccttaaacaatgggttaaaaaataaattttgtttcattttaaaatttcttaagacaaatgaaaatgaaatcagaacatataaaaacttaagaaatacagcaaaaaaagtcctcagagggaagtttgcagaaatacatttctatatgaaaaaaagaaaactctcattaataacttaagaatgtatttcaaggaatcatagaaacatgaacaaactaagccccaaattggtaaaaaagaatacaaataataaagaatagagcacaaataaacaaaatggagacaaaaatatgaaagatcaatgaaatgaaaagttattttttgaaaagataaacacaatcgatatgtatttagtcagattaagaaaaagagaagattcacataaataaaatcagatgaaaaaagacattgaaatggttactacagaaatacaaagaatcatgagaaagtactacaattatatgccaataaattagaaaacatagaagaaataaataagtttctgaacacatataacctatcaaaattgaagaatgaagaaacacaaaatgcaaacagaccaataacaaataatgagattgaagcattgtctctcaatacaagaaaatctggagggcctgtcacagtatctcacacatgtaaactcacactttggaggccatggcaagaggattacttgaagccagaagttccagattagcctggggaacatagtgagacccagtctttacaaaaataaaaataaaaattagccaggtgtagtggtgtgcacttgcagtcctaacaacgggaggctgaggcaggaggatcactgaagtccaggaatttgaggctgcagtgagctatgattgcaccactgcactccagcctgagtgacagaggaagaccctgtctctaaaccaaaaatatttaataagaagaagaagaagaaagaaagaacaaaagaaagaaagagaaagaaagaaagagaaagaaagaaagaaagaaagaaagaaagaaagaaagaaagagagaaagaaagaaagaaaaagaaagaaagaaaagaaaagaaaagtaaagttcaggatccgatgcttacactgctgaattcttcaaaacatttaaagaggaacttatagtaattatttacaaattattacaaaaaaagtgaaaaggaggaaactcttccaaactcattctatgaagacacaattaccatattccaaaatgagacaagaacagtaaaaaactaaactacaggccaatatcactgatgaacatgaatgcaacaattcaaaaccagcaatgctagcaatcataatttggaagtgcattaaaaagatgattcaccataatcaggttgtatttgttccagggaggcaaggagggcttatgatatgtcaatcaataaatgtgatacaccacatttgataagggaagataaaaaaatagtcatttaaatagatacagaaaaagtatttgacaaaattcaatgttttttgtaaacataagatctcttaacaaattagttataaaaagaacatagctccataaaataaaggccatatatgataacccacagccaacatgatactgaataaggaaaaattgaaaactgtgtctctaaggtctagaacaagacaaggatgttcactttaataacttctcttcaacatagcactggaagtcctagccagagcaattaggccagcaaaagaaaagacatccaaattgaaaaacaaaaataaagtcaaattgtccctgtttgcagatgacatgatcttatgtataaaaaaccctaaatactctactgaaaaaacagaaatagtaaatgaatacagtaaagttttagaatacaaaatcagcatagaaaaatcagtcgcatttctatacccaacagcataccatctgaaaaaggaatcaagaaaccaatcccatttaaaatagctataaaaaaatgcctgggaataaactaagccaaataaatatgtctaaaatgaaaactataaaacattgataaaaatcaattgaaaaagatacaaataaagggaaagttatcccatttttatgaattagaagtattaatactgttaaaatgaccatcatactcaaatcagtctataggtccaatacaatctctaacaaatttccaatgtaattcttcagagatgttaaaaaaggttttaaaaatcgttctgcggatgttaaaaggatttttaaaacgcttttttcgttctgcaggcgaaggctgtggccgtgctcccgccggccagttcccagcagcagcgcattgcccctgctccacgccttcgctccaggcccgcaggggcgcagccccgcgggaatcagcactgagccggtcccgccgccgccccagtgtccgggctgcgactgcggggagccgatcgcccagcgattggaggtgggcgacgaggccttccgccagagcgagtaccagaaagcagccgggctcttccgctccacgctggcccggctggcgcagcccgaccgcggtcagtgcctgaggctggggaacgcgctggcccgcgccgaccgcctcccggtggccctgggcgcgttctgtgtcgccctgcggctcgaggcgctgcggccggaggagctgggagagctggcagagctggcgggcggcctggtgtgccccggcctgcgcgaacggccactgttcacggggaagccgggcggcgagcttgaggcgccaggctagggagggccggccctggagcccggcgcgccccgcgacctgctcggctgcccgcggctgctgcacaagccggtgacactgccctgcgggctcacggtctgcaagcgctgcgtggagccggggccgagcggccacaggcgctgcgcgtgaacgtggtgctgagccgcaagctggagaggtgcttcccggccaagtgcccgctgctcaggctggagggtcaggcgcggagcctgcagcgccagcagcagcccgaggccgcgctgctcaggtgcgaccaggccctgtagctgtgacttggctgtggggctggcccgcctccctgacccctgtcaggcggagcagctggagctgacccacgggcctgggctttcgagcgctttgtccaggcgctaatgatgggaaggtgaaaggtgggggtggccacaccctgcagtcagggtggcaggtgtcagaggccacatgcaacccactggttttgtcttttccaggatgctgataagtttcccgcggcccccggagcagctctgtaaggccctgtaattgcctttcgttcccttctgctctattgaggagtgggaagatgacaaagtgtttttgctcaacccgaaggaaaatgcacatgggaggacacaccgggttactatttgagtagcccagacaggagagcagcggtctgcttcagccatgagaccacctcaggcaaaaatagacttgtggttgttttacttcttttcaccaaatgggtctttttggggtttgtggtgtgtcccatgtaacgatgatctcttggttcccctttctcattcacacccgggagctgaggtggggggtggggggcagggagtggccacctgcgccaggtgtgagagaagccacacctgagaccagcccctctgtcctcctgcctctgcatcgagcgtccctgcaggaggcagaaggggtgaaaagtagcctcgatattaaagtgcttgtgtgtccctgagggggtaagcaagtcacagtcgggacactggttcctgtcatcaggtgtagcacaaagaaggaccccaggacatggggtgcagaagggagcacagagagggtgggtgctactggggtgcacaggcagcttgaggaggatgcagatggcaaacttccctttgtcacgccaggtgcatgtttagggccggaggaccaccagatccccaaagcctccggtgcttctgaggcagaggagaggcaaggccagtggctaccggtgtccagggacctggcagccaccactgaggcctatctgcttgtccctcagcccactggcggccacactccaggtctctgggctctgcctaggacgtgtgtttgggcttctctcccgagcagaaatcatctgcgtaccctctgcatcccatggatttgctttgtttctgagggaataattaaggaatgttagtatgacatccgaaaatagctaattatggtgaagagctaacagggcgatctgggaagttgtggagctctagttagtgatgacagaagaggaacatatttgactgttttgtgctacacccaggttctcaggaggtggcaagggaggagacttggcactgtgccatgctcagagcccctggtcccagggactctgtttccctgtgggagtttggatgagagacagttggctgggaagctcagggtggagtgaggaagaacaagttgaggttcttgggttggaaagatctagtaccccaggaggggctggatgtggcctgcgcccaccccaaactcacacactctgtcatgctcacacagacacacacactcacacacactcataggcccaagctcacacaccacacttacatggcttattcacacacttacacacattaacacacatacgcactcatatttacacatccacacgcagttatattccacatacacactcatactcccaagttcaaacaccattatttcttcacaaacattcacacaataactcacatacacactctcacacatgtacacactcacccacacactctccattacacacatttacctgtctgttctcacacacatgcataaacacaaagccaaattagagccattttcctggtcccacacaaagaaaactgatacctcagtttcttggtcttgaccagaactgggtgcatgattccatccaaccacaaggtggggtgggaatgaaatcctatcacgtcctcaggccgtggagaaaaaaaaaaaaactatgtcaggcctctctaatgcctcccacaaatgagcaggagggattgaaacagaaaaggggttcctcctgacatgtggcattgatggagcccggttctgcctcatgccaagccctgccttgcccctcgatgatggaaaatggttgtgtgtcttgtttcctggcccccatctctgtctcggtacagagtagagatttgagtctcagtttcaaagacaggagtcccactaagctgacccacccactgacagatgaaatcttgccatctgctgaccaagttccccaaggccccttgagactcaatttctgaagagggtctgctcagaattccccgtccccatgatctgcccggctgtcgggacactggtgagcctgctcagtggggagtcccttttcagctcagtcagcaagcggctcttctctataaagaggcaggggatgaacctcctctctagttttagcagcagaggccatgagacccatggcagaggccagagctgtgcaggctgtaggaggtaccatgtcagggatttcaaacggaggaaggtactttccagagagtactgcagggaaccaagccatatccaccgtagctgcaataaagcctctgaggctcagcttaaactcaatcttagaaatgaagtcccagcacaagctttgcaggataagcaaaatctagagaagagaaaatgcagacccagtcaatgataaatataagtcatctggaccagcacagagcagatacagtgccttctccacatgcagtgaatgaggttctcacgtctgttagtgtgtggaattgaacatcagtatcagaatcattctgtgttacctacagctggttttatgttgttatgcctgtcacctgatgaatgtgtatctttagccaaccctttcaccccaaagctcctgccccaacccctcctcctggaagtgcccatcgctggtctcggcaggaggctgttcttcccagcctgtggggtggccaccttgcaggctgtaaccctctacaagaaataaagtcttctctccttttccaaatttcgatattcacttaatccttagcttctatttttcaagattttaaactgcttttaggtcatggcctcttctctgtagggtctggaggctgagagatgttcagcaggaaagagctgctaactaattccagtagcactgctcttctgcctaacggaggtgtttaaatgttgattttggcaaaatctatgagcaggttgctccccatctcccaagatctctcacaatactttgtaaaacccaatttagcgcatcgtctgtgagagcagcttttactggttctgcagcgatcttccttactcataatctattgaaatattgtaaagcgatgcagatttgtggcatgtgaggagagcatgtagacacacactccgctgtgattcaaagtgccctaacaccttcctcttccctacaggctgtgataggagggtgctctgggtcactgaagaaggggagtcataaaggagcagaggccccacgtcgtgagtgccatctctccttgagtgtggcctcttgttctagcccacaggcccaccatggtctgactaaatgctggcactgctcatacatccacttttaaaaattgagttgaacatgagaacatgatcattcatattttatccatttgcatgtattcaataacatcctttccctgttctcatctctgctttactgcctttttctttaaagaatgaatgtttccatgttttatatccacagaatttctggcttttccctttggagtccaaggagcaagggcagaatgaggaacaggatgtttcttacagactcatgaggccgcagcacagaaactgcaagaaatgtcagtcataaagtgtcccagtgcattttaaattgatgattattaaaatccttctttatctataggggatctaaaaaattaaacaactcataatttaaacacggttgccaggtagcctgagtcaaaaatcaggagaggctctgtggtctgaagtctcctattgctcaccttgatgagggtctagttgcctaatgggttggtgtaatgatgtcattcaacacaagcaaaacacaactcccttggagttgttcaaaaaatcaggaaatagaaaaaaaataagggagaataaaatattgacaggagagaaaaatgaagagttacttggagatttgaaggaggtgaaatgggcaaaaagtaaatttagcaactagaatttaaagtcagtggataattaagtcgaataatttattcttatgtccatgtactttggttttaaagttttgattaatactcattcaacactaatttctaacaaattagaatatttccacattgtctatttttaccagtgagcttgtaataaagatccgctagtaattttagtacatcataacctttcaaaagaagcccatagaataaactaatttttaaagagtcacattttattcaatgtctatttatacatgttactagcaataaactcttttatctttaattttgagaagctttacaaatacagaaaagtagaatgactaatactcccggtagccaggactcagattggaaaaataggtctaatcggttgttacactgtgtttatgtcatacatttcacttatttttatcaaataaaaattagaatttataaaatgttgattaaaaggaaaacagtaaagtttagtcccatgtttcttcctccaaatctctttgttctacattaacaggtcaggagaagtatggatggggaggctggaaaaggggcatccttccccatgcggtccccagagccaccttctccaagcaggacttggggaacatcctcctccatccaggacctaaggggtgtccttttctgtgcttccttggatggcagcctttcctgtgcagtcattcagaaagtcaggctgacacatgttgtcgtcttgaactctgggtgaatcccttcatgtttatagtgatttaccattaaatcactgtgccgttttttcctaaaatatatggggcgtgttttttgttctgagttatcttagtcctttggtcgctagctccagttttttgtaatttcttttgcaacctaatatgtgtcccatttggtaagtattacatatactagaaagtgacgtatattcagcatttgttgtgattttaaaaccttttataaacacgtaacatctttgtctatttcccgtttaaattcagaagtatgggttccagcgtccctctctagacctgctctatcctgttagtttctttgtatgtcctgcaggcgaggccagcattggacttgacgttgcttcacctactcggttctattgtccatccatgtgcagtgtctatcctgttgtttattatttcttccttaaattttatttgaactaaattaattttgtgatagcagcttgctttctgtgaatatttacttaaaatttttataaaatttttatttttttatttctttaatttgaaagtgctgctttgttattgataattttgtattttaatatatgaggttaatccctctatgtttggtaggaaaaagtgatatatttgaacttatttctatcatttgattttggattttgtatttgcaaagctttatcctcaattctcttttccttttttcagatttcttttcttttctctttttttggggggacagagttttgctcttattgcccaggctggagtgcaatggggagatctcagctcaccacaacctccgcctcttgggttcaagcaattcttctgccacagcctccaagtaactgggattacaggaatggaccaccatacccggctaattttgtatttttagtacagacagagtttctccatgttggtcaggatggtctcgaactcccgacctcaggtgatccacccaccttggcctcccaaagtgctgggattacaggcatgagccaccacgcccggacttccagatttattttccatcaccatttcattttccacttccttcctatgctggcttgcaggctttccaggctatttacctttatttagtgtcaaaaattcttttgggaacttttgagttgtcaaccaatagttgtaagcatattggatattgctgtttttctcctggtgctctggttataatctctcctattaatacctgtagtcttattgttgtagttattttttctattgatttctgagatataataattagaattgtcaaattgtggatttatgcatttattcttttaattcaataacttttgcttcatgtattttgctgtgtttcttaggtgcatgcatgcttatgcttattaggttttctaagcaaatgggcttattggtataaaacatccttctttatccctggtgatgcttgcctttcttgcagtgtgtcttacctgccattaatacactggctgcagtttttgataaaaaagattgcatagtgtatatttgtccatcttttcagttcgaatctatttatatctttatctcataagtgtatttctttttaaaagtggatattgaggtttcctttttacctactttgacagtctgtgttccgccttcctgatcttcttctggattattgcagttttggtttgtttgtttgttttatggggttttcttttttttttttagtatggattttgtaccctgtttttttttttaactatgactttgtttcatttatttatttttggtgagttgttcagaaattaaaatataaatacttaatgtatattaaatatcataacactgtatataaaatataaaaaccttaccttaccatcctctcatcttttgtgccatgttgtcatagatttttcttctgtacgtgttgtaattcctggaggatgtcatccaaacagtaatttcccctccacatatttactatttttggcacattttcatcttttctgtgaactagaatttccaattattatttttcttcatcctgatcaagtttcttttgcatttatcgtggtttgggttcgatggcaacacagtctcacagactttctttaactgaaaatgtacttttctcaacttcagttctgaaggctgcttcagcaggttcagaattctagggacacttttgactttgaacagcatctctgggtaccatctaacatattattatatccagttgtgtcaaatctgtcatcggccatagaaccctttgacaggtgcttcttgttgcttcagttctaagtatttcatagtcttcagagacatggagaagtagcagtgctagtaacagtactagtgaaaccaggttaagccctaaaataattaagaagccattgcatgcacacacgtgaacgtttgacttcagctaaaatgctttcaaatgtactattttatctttatacaaggccataacacaaattacaattttaaaaatactttcactttacatatgtgaaaactgcagctcaaagaatttaaaagacaagattgaaatcccatgagtaggtaaagatggtcaagtctggagcccgcatgtcttggtgccccccacaccctgttacagagagtgcgaggcttcaccagaaagctctttcggctcaaggattagctctggggaagtgcagcaggcaggcctgctttgcaaccttttttccagcagaaatccaatgtttgttcacgtttctagttcttttagttttgttttgtttcttaccagtatggctctgggagttatttacaaaatttaattttaaaagagacactccccatcattagggttccttggaaacttataaaaaagtaaataaatactggtagatgagaaacttctgcaaaattgttagttatatgtgtaatacatctaattgtaactaaagaaatgtgtattacggtaataatttaatttattattgtcattttcttgccagatttgagggcatttttttaagctctccacatgtggtttactgtggaccaaacactggcagcttcaggcttacaatctgctgacaaatccttcttagttcgttcactttgaagaatgtgagcgtgcactgctcatgtgcgtggcaagcatgcaacctgatcaggagaaggacagtggccactcacgtcatcaggtgaacttgtgacgaggccatcaagaggctgcacatgtgctccagaaaatgaaattcccactatcaacctattttccatttccacccaatggcccacccctgctccaaagccgtgtctccacctcttaggaatgcttgattttcagtattgctgaacaggggtcaaagaaaacaaactgaacaaagaaacaaataaagcctttaacccgggagcaaagacacagcacctccccactccgcaacagctccagagctgcacagctgctgccagagcctgagcacaggcctgaactctggcccatggatctcaccaatgcatttcttccctctgtgccaaaaaaagtatcgataaatgggattcatttacttgggacataaaataatgtatacctatagttttctcccagaactgtgtaaaccggcatgctgtctgccacaatacagtcctcaccctgcatcaggagctcagatgggggaagccagcagggctggatgcctgagagtcacaggtgcttggaggggagagaaaagcaccacggagagccaggccctgcctacaagtcacatttctaggggtctaatggtctgggcaggctgggagatgctctctaaaggaaaggcaagaaatattgccccacgtctcccaccaccaaacagaaagtgcaggtggtcagccccagggctcacctgccctttgccagggtcatgagtcaggcccaggctgcgccctccacacaatcctcaaggagagttcctgccaggctgggacaactgcactgggacctgatgccctgggaaggacagggttgcatttaacagaaacagctaaacctgaagggatgagtttgcctttccccggggccatgggatggtttatagaaagttctacccatcaggacaagacctcacatgacaccatcagaggaactgatttcacgccacagagggaggaagagggcacatgccataggtccactggtcacagcacacacatgctcctgggagcttcagacccagcagtgtggctcaggtgccaggtcaggatgtgggaggacacagtgtctgcatgaatctgtcacctttgttagctgccttgtcccaccaggtagaagatgtggcaattggagcacagcagtaggaagcccagtgtcccccaaccttccacatcatacccaggacctctgaggtgcatctatatcctgcacatctaggctctgaaaagcaggaggtcctggtttccacagctgtggggcttctagccagggcagggccaggttctctgaaaaaaacaagctctgggtgctgctttgtcctcaggctgctcctccatgggacctgcgggcagaaaaatgggtaccacctggaccatggtgtcagcaggagcagggctgcgctgcctggggaagaaagcgctccacgcaagtacctcctggtacacagcacttgatggcatgtggacaagtgcgggagccctagaccaaggactctgtggtgggcaaggctgagggccccttaggggtgagggcctgggttacaccaccagggggtcaccaggaccctcagcagaaggtggagggggtggtgatcattacctgtgcaaccctgagatgggtggcagccacagaacctagggttcattgaaccccccttttgtaactagtgcccaggaaaaggcctagaatttaataaagacaaggcccctgtcagtggagtgctggatggggcgcaccccctggggcacacctgaacctcccccagggccttggctgtgagctttgattgtagacacacctatgccacggccccttcagactgctcccttcacctctgaaaaaccaaacaggatgcttctgttcctggaaacgtgaatgcccttcgtgtgttttttactttgactagaaactcatctgcagctgaaatatatgcagagacctcgtgtgctcccaagatttccaggcatctctgagagtttgcttttcagttcccagaaggtgtgagagctccaaagcatgtgctgctggtttctcaacttagtgtattttagctccctgtggacagcatgtttctagcccccttgcacacgcttggatcggatttttgaaaaagccaagggtgggaggcagaatgatgtggaatgggcagaaactatgactaaaggctggcctcatcccaggaggagatagaatgcattagcccagtgacagtgccagggaacccatgcagcagcctagggaaggtcatggaatggagctggggtttcggctgtcaccatcccagggttagactcagccaggtgaacagctgattctcctccacagaacccttgggctggcacaaaacatgcaattcacagtgagagaaagaccattcctgtccaccccttgtagcctccacacacctgagcccatacctgacatatcccagaacaagactccacagctatgcatctgttctctccagggcatttcatgatgagagagggatttacttaatatgatgaaaatagaagaggaaatgaccttgacaagtacatagttccacacccgccatccagggcctaggaatagtgctcagccagggcccggcccttctagggctctgggaagctgcagtgaaggtggggttgggacaagcaagagtggccatttgcaggcagtgtgggcaccaggccatctgcaggggaaaagcccagtgggaggatgagacgacagcagaaacctcgcaggggctatgcaccccctccccgtgggaaggggataccctcccaggtggagccactgtttacattgaaatcactcaagtccatcaccaggaaacacaaagaggactgtcttgccagagattagtgatctgggacttaaacaaaatgccagtcagcaaatgagaggattcttagttccacaggcctcatgtctatagttgcagtaagcaagactgaactcagccatgctcacctgcagacactgagatgcttgctaggaggctgtggggtggaatacaagacacgagggctgacaaggatgggaagagcatccctttcctggctaggggccttggccaattcaaaaatagataacatggggtctcagagctcctgaggcaagagctacgtaggcattcagagatacctggatgatggcattgtcttcagtagaaccttgaaaaagcaccagggactcccaggcaacttagcttaaatctgtcttgagtagagctggtctttgggatctccatcaagtgggtgatgcctttaccaccatgatagcacattataaagttggccttgctagcagcagggacaggcctgatgtcactgatcctgaggcaagcatcttataaacccatataatttaattttgcataggctcaagctcatcactgagatcatcctttgtatgatgatccatgaggccaccgtgaacagcatggatggacccaggccatggaggggccctcttcatcctggatgaggagcccacagtggccattgcccctcagtcagaataaaatcaagacaaaagcaatcagaagacccatacaccatgaggctgagccatttttcaaagatgtcaaaataggaaaatactaaaatggaagaaaacccagaatcccatcccctgacttgctccagaggcctccccaactccaggccaccaggagcaggggccctgcagaggaactctccctgggtagaaattcgctggtttttgccttccaccagatgttggcaacttcaatttcatcttttttggcattagagctaatgttaaaatgactcaggtcaaaaaagagtgatgtgctgcagccctgacaatgctcccagtgagaatttgtgcaaaactcttccctggatctacaaaaccaggtccaggcagggtgttggggctgtgacgactgcatctctgcctcctcctctctgcagtgcggcctcttcacaggcagagcattcattcctctttagcttctcaccagcccaggatgcagggaagaagtagcttatcagcacagtcttggaatatttttaccttaccagctgggctcctatgaacaatgtgtccagctataggtaaacaatgtgtgcaaataatgtgagagtgacagcaccatgtcagaaccatgcaagaagctggccagaggcacaagcagcagatgggatgctgatgggggtgaccaaaatacagtatggggcagctgcatgccatgatcaatctgcaggggtagggaaaaaaataactctcggcctggctaacatttgcgtgggggaacagtgacccaagtccccaggagaacgttgaagagaaccacggtttattgtgaaagggaaaagtaaccgcagaggcagagttttctttctggttctaagcagatgggaggggtgtagcctgcagaaccaagggtgtggggatcctagaatgttgttggtggttgttcagcagagggcttcgcttctcggcctgcagaactttccgcctgtgagtgtgggttacatctatacatacacaggaaatcatatactctcactcagccgcccacatctaaacatggtagtattaggaaaaataggaaagcaacatcctactagattacattgcttgcagtgaaaccatttaaacccctgagcctctgtgtcaccaattaacactgtgtgtaaggagaatgcctgccccgtgggggtttgtaaagacaaaatgtaaaaataaaatgtaggctgggtgcgatggctcatgcctgtaatcccagcactttgggaggccgaggggcacggatcacgagatcaggagatcgagaccatcttggctaacatggtgaaaccctgtctctactaaaaaaataaataaataaataaataataaattataaaataaaatgtagtgtgcttggtaaactaaagttctaaataaatattagttgttactattactatgtcagaagtactagtcacaagactggaatacttcacttgaataagaactcagtgcaaagaagttggacaaatcggtgagtttgaaactgcaacaggactaaaaatatgccaattaatttattaatgtattcatatttattaacttatttatattcaaatgaattaaatatttagtgcatgcttggacctgggaacacacagccatcagtgccacacgaactctgtcctcactgcagttgttttcagatgacctcagaggaaaataagagggaaaccactggcaatttccttccgttgataccttagctgactacatagctcatgttaggtcggtcttaatgaggaaatcagaatattcggggcttcagtattaaaactacaaatctctatagcaagcattcagagctctttggattagacatcagtggctgcagtaatgttacctgagaaacccacacactttctgaacactggcatgagtatcctttcctttcggtccactatatatggaaaaacactttcacccatcaccctaagtgtcccaaactgcagaagaggcagatagtagccagctagtccctgtcaaaggcccattgcctttttctgggtcagcctggtccacccagcctgaggtgctctctgagacagcctagccaccacgccacatgcccttcagcctaatcagagcatcaggatgctgtgcacggccattagctggggtgactcagaattatctgctgtagaacagggctctgagtgaaggatgtggtcactcagaccacgtagatggttcaagctcttactcctctgtcagctcagagcctgcacagtggaaaggaagtgcatctattgatttcttggccaaaagaactagttaatacatttttaaaaactttgacattttgttttaaagcaacagtgggccttgtttaactaaaatctcatttctccagcctaattttgctggaaaggccccaaaccaaggcaagcccctggaggagagagagcagctaggatgctggcaccagatggctttgttccccagccttcaatatactcagttagaaaataaccacatcagaggtttgataagattatcccccaggccatttttcaggtctaaatgttaccatattttatacgagaatacggtatttgaatcaactctcaggggacccagccttcaggagacactgaaggaatacagacattttttctagcttcaaaagcatggtttgcaaactggcttgttctttgccggagaaaaccacacacgtggccattgatgcccttgattggcagagttgatgggattttctctggctgtcaccttgagggcatcatcagcatcctgaagtcacttgcaggcctctgtgcagatgtcctttcgaggggcttcaggctgtggaagtgaccagtgaacacaggacctgcctggactcccagcctcacagcacagcaccacagcctggactgccctctgcctgatacttgcttggtttggaactttactccatcaaagcatccaaataaaaatatgtagactccccaccctatcccatctgctatagggttctaattcccccacagccatcccatcacagtgctttcccccatgacgggggacccctgccctggactccatccctcccctactggaaaagcacaggtgctgtggcatgagttcaaccgactgaaattccctgatcttcacagtaataattctaaaatagggcaacaatacccctgtcagtgttcttggaagaacctctcattacttgaggccccagaaatgcaaacaccctcctgttttccagtgtgctgtcaaccctggcatcagagctgttcctgccatggacactggtaattgacttactggagaaagtcaagcttttaagtcccaggaataaagggttcctatttccttaagctgtgtttatttttacaccattgctggtagagtcaatgtgtactgagtgaagatgaggcaaaagtgtcaaagagtgatttccaataagatgaaaagtgatctgcagtttccacttccttaaccagcaggaaacgtctctcctgtagcaacggacagtggaggcagtggcgctcagtgtggggcctcctggctgaaggaggggacaatatggtgtcccatctcccgagatgctgtatgcacctcacctggctggtgatttacttgaaagaaacccatgtgtggagtagggagtgctgcctttggcatctacccatgtcctgctctggactctgcctcttagcaagggtgacttgtgggcccaactcacctggtggctgtgagccactgcactccagcctgggcaacagagtgaggccttgtgtgaaaataaaataaaataaaatataaaaataaaaatgagccaggaatggtggctcacggctgtaatcccagcactttgggaagccgagacaggcggatcacatgtggtcaggagttggcgactagcctgatcaacatggagaaacgctgtctctactaaaaatacaaaaaattaacctggtgttgtggctcatgcctgtaatcccagctactcaggaggctgaggcaggagagtcgcttgaacccaggaggtggaggttgcagtgagccaagttcccgccattacactccagcctgggcaacaaaagcgaaactccgtctcaaaaaataaaataaaagactttaagtcattcatcaattttatgtatctactatttcttctcccattccataaagcctacagtcatacaacagaaagggaaaatcaggacagccacatataaataaaggtgcaaagttgaggcaggagtggaccttaagggccaagcagaggtcattgctgagccctggtcatttagccctgggctttctggaagccagagtgaaaagagagacacaatcagctgcataagagttatcaaaaagcaggaagcgcgctggttttcctggtagtaaagcaagggctttccaagaatttacctctaaagtaatttcttttgttctttcttttttctcgctctgacacccagttggagtgcagtggcacaatcagggctcactacaacgtctgcctcccaggctcaagccatcctcccacctcagcctctcaaatagctgggactacaggcacgcaccaccatgcctggccagttttttggtattttttgtagaggtgggattttgccatgttgcgtaggctggtctggaactcctgagttcaagcaatccacccaccttggcctcctaaagtgctgggatttcaggcatgagacactgcgcccagcctaaagtaatttcttacttgagattttatttcaggctactgtgtcatgcactgggcagtacagcctggtgggtgagagcacagtggttttttttgttttgttttgttttgtttgtcttctgggtttgggtttgaattttaatacgtgcaatttattctgtgcttcactttcttcatctgtaacatggagataacggcgtctacctattaaagttgtgaagattcaattagatgagttgtatgaataagtgttagctgttattttattttatttatttttttgagacagagtctcgctctgcgcccaggctggagtgcagtgacgcaatcttggcccatggcaacctccgcctcccgggttcaagctattctcctgcctcagcctcccaattagctgggattacaggcgcctgccatcatgcccggctaatttttgcatttttagtagatccgggttttcaccatattggccaggctggtctcgaacacctgacctctggtgatccacccgcctcagcctctcaaagtgctgggattacagccgtgggtcactgcgcccagccagctatcaagaaatccgactgcctactacttagcctgcacagtttcaggtgctggggaaatagtgatgaacaagacaaacaagatcctcatcttcaagtagcttttacattctaagtggagtgaaaaaacaataaacattgaaaataaatttcagaaagtgctgtggaaaaactttacaacagatgcaggaatagatttcatttgactagttctcccagtttccagaaaaatcaagggtagaatgttaaaaggcaactcagaggtgaatctgttagggcctacggtaatgcaatcctggtttgtggaattccgcaggctagtgtgggtaggttacaattttggggggagggctttattttgtttgaaaattcacttcttcccgctaagcttttgattaggagctgaagttgaatcagtttgaaattgtattctggatcgagtgcggtgcttcatgcctgtaatcccagtgctttgggaggccgaggtgggtggattgcttgagcccaggagttcgagaccagcctggacaaaatggcagaaactccatgtctacaaaaaatacaaaaattagccgggcatgatgttctgcgcctgtagtcccagctactcaggaggctgaggtgggaggatcgcttgagcccaggaggcggagtttgcagtgagctgagatgtcactgcattccagcctgggagacagagccagactctgtctcaaaagaaaaaaagaaaaaaaaaaaagaaaagaaaaaacgaaattgtattctgaatacatcttctaaaacactacatttacttgcactatattaaactggttttatcctgaccacaattgcaggtgaaagataccactgttgttctatttttctggtaagtagagtgagccatgtcttccccagggaaagacgcctcctaaaaatttgtaggaccacctttggttttcttccagatattttttttgtcatcgcttttcctgcgcccaattcccatctgtctagcccttctgcctccgctcgtctttttcgcgagcctctccccagccgcaggtattcgtctgggctgcagcccctcccatctcctggggcgtgaccacctgtccaggccccgcccccgtccaacccgcggagacccgcccccttccccggacaccgggttcagcgcccgagcgtgcgagcgcgtccccgctcgtcgcccggctcggcgtcgggagcgcgctctgtgtggtcgctgctgcagtgttgttgtggctgtgagaaggcggcggcggcggcggagcagcagccggaccagactccctagtagctcaggcgctgccctgcgccggccctggcagggagcctggtgagatggtggaggaggaggctgtgccgtggctggccttgctgtgtcctgctgcctggttagaaccccatccccgtcccccgtctcctccggggggtgaggaggagctggaagaggggccggcctctgtccggcccggccaggcggccgtcaccctctgaggaggcagcgcccggggaggggcctcccaggcggccgccgccgccagggggaggcgctgggagtgggagtgggagcgggacctcagctgccaagctcggcccggaccctaggtgcgggggaggcggggtcccgggctcgggctgcctgcccggacctggcggggatgggcccgtgcggctccgggtgtgggacgtaccctcagagcgcccggggttattcccactgactccagggaggtgagtgtgcgcccttcgctccctgccgtgtctgtgagggtccatcgttgccggagactggaggtcgggggccatgggagccccggggcgaacggtgcggacatgggccttgtggaaaggaggagtgaccgcctgagcgtgcagcaggacatcttcctgacctggtaataattaggtgagaaggatggttgggggcggtcggcgtaactcagggaacactggtcaggctgctccccaaacgattacggtgttatttctccggtagaaattttgcttggtgtatggcacttccggacccataagatgatgtcagttgtattttgggctggaaaaattatgtcaaaattatggggtagattttatggccacattaatagactcccctggagtttgataatctcacttgtgagttttggacatgaactactattacatattgatgttcgaatgtcgtttccagacccagacctaaattcttactgttctagtatcttgatatccactttgttttctgacatctatttttccacaacccaaacaaacaaaaccccaaaaccatatacttttccagttgaggttcaactttctcacagtaaatcccttcccatctgggattacaggagtaatagcaacacagtgtgtgtttatagatagcagcaataatacatttattatatataatataataaatgtattaatattatatatttgtatatatacaaatatatataattacatatatttattaaatatataagtaaaaatttattatatataaattttaatttatatataaaattacatatatagtaatatgtattgaaatacatattactataaatgtaatatgtatttcatttgtgtatatgtcaatatacacaaatggaagcaatgactacgtaataagtgctaagtcttttttgttcttgttgttttgagatcaagtgtcactcttgtttcccaggctggagtgcaatggtgcaatctcggctactgcaaccactgctgcccgagttcaatcgattctcccctcagcctcccaagtagctgggattacaggtgtgtgccaccacacccggctaatttttgtatttttagtaattttccccagtgtgtggcttggcttttcactctctaaatggtgtcttttgatgaacagaaattgttaattttatgaaagtttaatttatcaattatggttagttatagttatgtacaatttggaaaatcattgcctatcccaacattataaaaataatgtcctacattcttttttaagaggttacattattttacatttctcagcagggtctcagatctagttgatgtgattttttcaaatcacaaactcacttttgtatagggtttgaggaggggtcaaaataaatttttcctcatagatatccagttgatccagcaccttttattgaaaaggccattcctcacactaaattgtagtagtgcttttgtcaaaaatcaggtgactgtatatagaaaggtctgtttctgatctgttttctgttttattattctaggtgtccatgcttgttctaataccttactatttgatttactttagctttataccaagttttgatgtttaatcatgtaaatcctcaacctttgttctttttcaaagttatcttggctattaaattcttggtatttctaaatatagttttaaaacagtgtcagacaatgcttttttattatttaaagatgagatactaagtacctgaacacaatgacaaattctatgatcttctgaaactaacctccgggtgtgagaatttgaaggttagtggatagaagatggccgaataggaacagctccgatctgcagctcccagtgagaccaacacagaaaacaggtgatttctgcatttccaaatgaggtacctggttcatcatcattggcactggttggacagtgggtgcagcccacagagggtgagttgaagcagggcagtgtgtcacctcatccgggaaatgcaaggggtcaggagatttcctttacctatccaagggaagctgtgacagactgtacttggaaaaatggtacacttctgcctaaatactgtgcttttcccatggtcttagcaaccagcagaccaggagattccctcccatgtctggctcagtggatcccacgcccatggagccttgctcactgctagcacagcaatctgagattgacctgagaggctgcagccgggtggagggaggggggtctgctattgctgaggcttcagtaggtaaagaaagcagccagaaagctcaaactgggtggagcccaccacagctcaacaatgcctactgcctctataggctccacctctttggacagggcatagctgaacaaaaggcagcagacaacttcttcagacttaaacatccctgtctgacagctctgagagagaagtggttcttccagcatggtgttggaactctgagaatggacagactgcctccttaagggggcccctgatccccgtatagcctgactgggagacatctcccagtaggggccgacagatacctcatacaggtgggtgcccctctgcgatgaagcttccagaggaaggatcaggcagcaatacttgctcttctgcagcctctgctggtgatgcccaggcaaacagggtctggagtggacctccagcaaactccaacagacatgcagctgagaggcctgttagaaggaaaactaacaaacagaaaggaatagcatcaatatcaacaaaaaggacatccacattaaaaccccatctgtaggtcaccaacatcaaagaccaaaggtagataaaatcacaaagatggggagaaaccagagcagaaaagatgaaaattccaaaaacctaagcacttcttcttgtccaaaggatcgcagctcctcaccagcaacagaacaaaactggacagagaatgactttgatgaattgacagaagtaggcttcagaaggtcggtaataacaaacttctctgagctaaaggagcatgttctaacccactggaaggaagctaaaactcttgaaaacaggttagatgaatggctaactagaataaatagtgtaaagaagaccttaaatgacctgatggagatgaaaaccacagcatgagaacttcgtgacgcatgcacaagcatcaatagctgattcaatcaagtggaagaaaggatatcagtgattgaagatcaaattaatgaaataaagtgagaagacaagattagagaaaaaagagtagaaagaaatgaacaaagcctccaaaaaatatgggactatgtgaatagaccaaatctacatttgattggtgtacctgaaagtgacagggagaatggaaccaagttagaaaatattcttcaggatattatccaggagaatttccccaacctggcaaggcaggccaacatgcaaattcaggaaatacagagaatacaacaaagatactccacgagaagagcaactccaagacacataattgtcagattcaccaaggttgaaatgaaggaaaaaatgttaagggcagccagagagaaaggtcgggttacccacaaagagaaaaccatcagactaacagcggatgtctcagcagaaaccctacaggccagaagagtgggggccaatatccaacattcttaaagaaaagaattttcaacccagaatttcatatccagccaaactacgcatcataagtgaaggataaataaaatcctttacatacaagcaaatgctgagagattttgtcaccatcaggcctgccttacaagaggtcctgaaggaagcaataaacatggaaatgaacaatcagtaccagccactgcaaaaacatgccaaattgcaaaggccatctacactatgaagaaattacatcaactaaggggtaaagtaaccagcaaacataataatgacaggatcaaattcacacataacactattaaatgtaaatgggcaaaatgccccaattaaaagacacagacttgcaaattggataaacagtcaaaaccatcagtgtgctgtattcaggaggcccatttcacatgcagagacacacataggctcaaaataaagggatggaggaagatctaccaagcaaatggaaagcaaaaaaagcaggggttgccatcctaatctctgataaaacagactaaaccaacaaagatcgaaagagacaaggtcattacataatggtaaagggatcaattgaacaagaagagctaactattctaaatatatatgcacctaatacaggagcacccagattcataaagcaagtccttagagacctacaaagagacttagactccgatgcaataataatgggagacttcaacaccccaatctcaatagtagatcaatgagacagaagtttagcaaggatatccaggatgtgaactcagctctgcaccacatggacctaaatagatatctacagaattctccaccccaactcaatagaatatatattcttctcagcaccacatcacacttattctaaaattgaccacataattggaggtgaaacattcctcagcaaatgtaaaagtacagaaatcacaacaaactgtctgtcagaccacagtgccatcaaattagaactcaggattaagaaactcactcaaaactacacaatgacatggtaactgaagaacctgttcctgagtgactactggataaaaaatgaaatgaaggcagaaataaatatgttctttgaaacaacataccagaatctctgggacacatgtaaagcagtatgtagagggaaatttatcgtactaaatgcccacaagagaaagcaggaaagatctaaaatcaacagcctaacatcaaaattaaaagaactggagaagccagagtaaacaaattcaaaagctagcagaaggcaagaaataactaagatcagagcagaactgaaggagatggagatacaaaaaaccgttccaaaaatcaatgaatccaggaggtggttttttgaaaagatcaacaatagatagactgctagcaagactaataaagaagaaaagagagaagaatcaaatatgctcaataaaaatgataaaggggatatcaccaccaatctcacagaaatatgaactaccatcagagaatactataaacacctctatgcaaataaactagaaaatctagaagaaatggataaattcctggacatacacaccctcccaagacagaactaggaagaagttgaatctctgaatacaccaataacaggttctgaaattgaggcaataattaatagcataccaaccaaaaaaagtccaagaccagatggattcacagctgaattctaccagaggtacaaagaggagctggtaccatgccttctgaaactattccaatcaatagaaaaagagggaatcctccctaactcattttatgaggccaacatcatcctgataccaaagcctggcagagacacaacaaaaaaagagaaatttagaccaatatccctgatgaacatcagtgccaaaatcctcaataaaatactggcaaaccaaatccagcagcacatcaaaaagcttatccaccatgatcaagtgggcttcatccctgggatgcaaggctggttcaacgtacacaaattaataaatgtaatccatcacttaaacagaaccaatgacaaaaaccacatgattatctcaatagatgcagaaaaggccttcgacaaaattcaacagcccttcatgctaaaaactctcaataaactaggtattgatggaatgtatctcaaaataataagagatatttaaaacccacagccaacaccatatcgaatgggcaaaagctggaagcattccctttgaaaaccaccacaagacaaggatgccctctctcaccactcatgttcaacatagtgttggaagtcctggccagggcaatcaggcaagagaaagaaataaagggtattcaattaggaaattaggaagtccaattgtccctatttgcagatgacatgattgtatatttagaaaaccccaccgtctcagccgaaaatctccttaagctgataagcaacttcagcaaagtctcaggatacaaaatcaatgtgcaaaaatcataagcattcctataatgttgccggaagtcagggaccccaaacagagggaccggctggagccgcagcagaggaacataaattgtgaagatttcatggacatttatctgttcccaaaattaatacgtttataatttctaacacctgtctatactgcaatctctgaacataaattgtgacgatttcagggacatttatcagttcccaaatagtactctttgaatttcttatgccagtctttactttaatctcttaattctgttatcttcctaagctgaaaatgtacatcacctcaggaccactattgtacaaattgattgtagaatatgtgtgtttgaacaatatgaaatctgattgtaaaacatgggcgtttgaacaatatgaaatcagtgcaccttgaaaacgaacagaataacagcgattttagggaagaagggaagacaaccaaaggtctgactgcctgcggggtcaggcagaatagagccatatttttcttcttgcagagagcctataaacagatgtgcaagtaggagagatatcgctgaattcttttcccagcaaagaatattaataattgataccctggggaaggaatggattcctggggggaggtctataaacagctgctctgggagtgtctgtcttatgcggttgagataaggactgaaatacgccctggtctcctgcagtaccctcaggcttattagggtggggaaaagatcccgccctggtaagtttgaggtcagaccagttctctgctctcaaaccctgttttctgttgtttaagatgtttatcaagacaatatgtgcacagctgaacatagaccctcatcagtaactctaattttgccctttgccttgtgatctttattgccctttaaagcatgtgatcttcgtgatatactccctgttcatacatgctctccccttttaaagtccttaataaaaaccggctggttttgtggctcagggggacatcacggacctattgttatgtgatgtcacccccagaggcccagctgtaaaattcctgtctttgtactctttttctttatttctcaggccagccgacacttagggaaaatagaacctacattgaaatattgggggctggttcccccgatactataaaccagtaacagacaaacagagagccaaatcatgagtgaactcccattcacaattgttacaaagagaataaaatacctaggaatccaacttacaagggatgtgaaggacctcttcaaggagaactacaaaccactgctcaatgaaataaaagaggacaaaaacaaatggaagaacattccatggtcatggataggaagaatcaatatcatgaaaatggccatactgcccaaggtaatttacagattcaatgccatccccatcaagctaccaatgacttttttcacagcattggaaaaactattttaaagttcatatggaaccaaaaaagagcccacctagccaagacaatcctaagcaaacagagcaaagctggaggcctcacgctacctgacttcaaacaatactgcaaggctaccgtaaccaaaacagcatggtactgttaccaaaacaggttatatagaccaatggaacagaaaagaggcctcagaagtaacaccacacatctacaaccatctgatcatggcaaacctgacaaaaacaagcaacagggaaaaaattccctatttaataaatggtgttaggaaaactggctagccatatatagaaagctgaaactgggtccctttcttacaccttatacaaaaattaactcaagatggattaaaaacttaaacgttagacctaaaaactataaaaaccctagaagaaaacctagacaataccattcaggacataggcaagggcaaagacttcatgactaaaacaccaaaagcaatggcaacaaaagccaaaatagacaaatgggatctaattaaactaaagagcttctgcacagcaaaagaaatatcatcagagtgaacaggcaacctacatattgggtgaaaattttgcaatctacctatctgacgaagggctaatatccggaatctacaaagaactcaaacaaatttacaagaaaaaaaacaaccccatcaaaaagtgggcaaaggatatgaacagacagttctcaaaagagacatttatgcagccaacagacacatgaaaaaatgctcatcattactggtcatcagagaaatgcaaatcaaaacaacaatgagataccatctcatgccagttagaatggcaaccattaaaaagttaggaaacaacagatgctggagaggatgtggagaaataggaaagcttttacactgttggtgggagtgtaaatgagtttaaccattggggaagacagtgtggtgattggtgattcctcaaggatccagaactagaaataacatttgatccagcaatcccattaccgggtatatacccaaaggattataaatcatgctactgtaaagacacatacacacgtatgtttattgcggcactcttcacaatagcaaagacttggaaccaacccaaatgtccatcagtgatagcctgggttaagaaaatgtggcacatatacaccatggaatactatgtagtcataaaaaaggatgagttcatgttctttgtagagacatggatgaagctggaaaccatcattctcagcaaactatcacaaggacagaaaaccaaacactgcatgttctcactcataggtgggaattgaacaatgagaacacatggacataggaaggggaacatcacacaccggggcctattggggggtgggcagctgggagagggatagcattaggagaaatacctaatgtaaatgatgagttgatgggtgcagcaaaccaacgtggcacatgtatacctatttaacaaacctgcactttgtgcaaatgtaccgtagaacttaaagtctaataataaaaaaaacaaatttagtggacaaagtgagtagctatcttttctgctttcatctcactaaatctagtttaataatcagattgcaataacataataaattttatagtaagattgtatataattacctatatattggaagacaagggaaaatttataactgtgagtgctgatgaagctaacatattacctgcattttgaagtgtgaatgaacattcaacaggaatgcacttatttcatggaataagatgtaagatgtaagagatatgaaagaaaaatatgagtaatgtaataagtaatgctttaaaaaaaagtagggaagccattaatgtactgtgactgttacattatgttcaaaatgagaactaaagccatattcaacagatgcctcccacacttttatcatactcttcttatatctgtacttttttttttttttttgagacagagtctctctctgtcaccaaggctggagtgcgatggcgtgatctcagctcactgcaacctccgcctcctggggtcaagtgattctccttcctcagcctctcgagtagctgggattacatgcatgtgccaccatgcccagctaattttttgtatttttagtagagatggggtttcaccatgctggccaggctggtctcaaattcctgacctcatgaaccgcccgtctcagcctcctaaagtgctgggattacaggcatgagccaccatgcccggtcttagatctgtactttctaacagagcaacacaaccagcatttctaacaaatgctgcaaatcttaaagacgatggtgttcagcataatctaagaatacagagcataaaaacctattttggaaaaaatattaaaagcataatggtaaaattcaacacttatttttagaacctactgtgtgccaggcactttaaaaaatgtttttaatacaaggatgagcaaaattggtgaaatctctgcccctgtggagtgtccagtctaatgaaaaaaacagcaagttaagaagcaaatgcataatatagtgttaggttgtgataagggctatgtggaaaaaataaagtgtggttgaatatagaatgacacaatgtgtgtgtgtagagagtattgttggagagaaggctcagaagtgaaagaaatgatgaaagaaccacaccaatatctgatgcaagagggaatagccaatcagaagccttaaggctgcaagagctgggaggtttaataaacagcaagaaaaatagtgccaaagtgatatagagtggcagagggaaaagtagtaagtaacagatacaaaagataagcagggcctagattccctgtggcctgggagataatggtgaagacttatggatttgtttcatgtggtgaaaatctgttgtagaatttgagcaggaaatgatgtgatctgatctacgtttttgaaagaatcattctggctcctgtttggaaaatagctgggattgggttggaaaaaaaaaaagtaatggaaatagagggaacaatcagaaatgactgctgtaatttagaagagagataacggaaacatggcctcgggtagtatctacaaaaaaggtgagaactcgatttaggatgtgttgtgaaggtaaagttgacaggctttgccaatagaatggatttggagtgtgtaaaacatagggaatccaggctgatttttaaattgagggccagagccactggatagttagagatgatatttccactaagactggaagtgagggggagcatcatatttggggcagggaggaatcaaagtttctgttttgagtggttaaattcagaatgcttctcagatatcccagaggaggtgttaatttggcagtcaagtatctgaatctggacacagaggggaggtcaaggctggatgtgttagtttagaaataaccagcatttgggtaagattaaaacctatgatataggataaaattatctagagagagcatttactcagagaactctcaatattcaggaacacaagcctatccagactggctcaggataaataaagttttatgtagaagacaaatagttgcccatgtagaaccaaagaaaaggcgcaaataaatacaagcccatcatctctcttggttacatagaatacatgaggcagtaaaggataaggattaaactttcaagatgtgaatgtcttgaattcagatgtcaaacagaaatgaatttgaatctgtttcccaccagccaaatgagtgtttgatgaagatgaccatgatgatgataatgacttacatttcttaatgtttcccgtatgtatgtaggacttttaaacttgttccagtacaggtagggaaagaaaattcacattagtttattcacacacatatagagagagttggggtatctgcgtgctgcccaggctgggcatttgagcccattcctgggctcaaataatcctcctgcctaggtctcccaaagtgctgggattacaggcatgatccactgtgccctgccctaaatatattttatatatagcaggtaataaaacaagaacatgaggattacaatttttaatcacagagggaaagattttgtgagaataacataatttcatattcaaacagcaagtctttagctaattctttgattaaagtattgacaaaaccattttgaaaaatgtttctgaggcacttttacctgtgaagttttgaaagatctacactttttttttttttaatgttttttttttttattatactcttaagttttagggaacatgtgcacattgtgcaggttagttacatatgtatacatgtgccatgctggtgcgctgcacccactaacatgtcatctagcattaggtatatctcccaatgctatccctcccccctcccccgaccccaccacagtccccagagtgtgatattccccttcctgtgtccatgtgatctcattgttcaattcccacctatgagtgagaatatgcggtgtttggttttttgttcttgcgatagtttactgagaatgatggtttccaatttcatccatgtccctacaaaggacatgaactcatcatcattttttatggctgcatagtattccatggtgtatatgtgccacattttcttaatccagtctatcattgttggacatttgggttggttccaagtctttgctattgtgaatagtgccacaataaacatacgtgtgcatgtgtctttatagcagcatgatttatagtcctttgggtatatacccagtaatgggatggctgggtcaaatggtatttctagttctagatccctgaggaaaaaaaaaaaaaaaaaaaaaaaaaaaaaagagaataggcacagaagtgaatttgccttgtaaacttgacttctgagctgcataaatattttacgtaattacaaaacaaaaaataaaaaagcaatttttacaaatcttgtgtgttcagttaggagcacaccttcacagagaggaactcttcccaatggctttaaggcacaattgttgttgtttttaaaaatatcttaaataaatttttatttttatagatttagagggtacaagtgcaggattgttacatggataaattgtgtggtagtgaaatctggggcttttagaagacacagtaatttgactctccatccctagtgcacaaaaaagaattaaacaatttccagtattcaggatccaaatgaagttcatacagtgattgtttgaaataacttttaagtctcttataatccatatttccacatttctttctttctttttttaatttatacatttttctgcttattgaagaaaactagttatcctgtagtttttcctacagtctgaattttgctgttgcatcaccataatatagaaataaaaatgatgtatgatatttatgagctaattggaaatgtgaacatagactggttatttaatgatattaagaaattattgtttattttgtcaggtgagactatactgtggtcttattaaaatgagatatatactgaagaaaaaaaaaaaaaaaagaaagatctacacttggtaaatttagcatcttttaatttttcttcccctacagtaattacaaaattctggagggggaaaaatgtaatattctccaggagtgagaatggaagacaatactttgagctatactagacataatcatttttgtacatgcactttcagaagaggtcccatgctgtggactgaacttgaaacgaaatacagtaattgtctctggcattaaatacccataggcatatttttacaagaacatacattagtatatgcctgctagatacataacaatgtgtgagtatattttaagagaatcttaatgtgactaacaaatagcaatcaaattgttcacaatttcaggctcaaaattgaaaagaagaggaattttttttactaaaaaattatatacacagaaagagtgattcaaagttgagcattaatgcaaattaggatgaaatacgagaagtaatccttgccaaccatctgcctagcttctccccacttctacccttccctagcaggggtgagctattttacctcctggggagatgggaaatgacagagagtgagaggctaatcagaagtttcaagcacccccttctctaaaagcaggaggctgttggtgagtactggaattttgtttttctaatttggtcttgaggtttctctctggaaaatggctgtgaattctaaccctgcactgaaagggctccagtatttgggtcatggatgtctacagtgacttctttatcctagtggatggcctaatgcctaagtgttgcctagtgcctaagcgtccaacccatgaccaggtgtcccactcacaggaaacatgcttataccagcaggcaccctcgtggctcttgtctgacctatgtccagtttatttctaccaagatatccattgtctaggagagctttcccttggaaagaaactaggttcaggtgtgtcagtcaggtgagatgcagaggaggcgatgcaacaaaaaccacacaataataggaggagtttattacttacagattagagaaaagggcagcactccttgcagagctgatgggaaagcagagccattccagatatacatgctctaccagaaccacaaagtgcagagcaaaagagagagtgagggacctgtgtgctaaagcttttattggagtccagggtattattaggtgggtttccatgggagttctaatttgcgagtttaaagcaagctgttccaagtcctatgtggccacgctgttactgagaggttgtcgctgcagcatatctgtacagtctatgggggatggaggagtcagtggggtaagccaataggtggtacctaactgtcccttagggaaggtggtcaacagcagacaattgtataagggagatatctggattgaccatattaaggaactgggatgaaatagagaactggaaattgtgccaagggtgactaaaccatgtttcttgtatgagaaagtccaacttatattcaaaatgaatgccaaggcaatataaaattacaggaattcactaccatgcacccccatgctcctgaattttcaagtccagactccctatatgtagctgataatatgggtgccaagtaatctggaaattcctggaatttctgctgctaattggaaatcccagcccatttctttcaaggtaatctgtctttgggtccaaagtcagcattttatgacacttaggtgctctcatcaaaggtgtgtgtatgaaatggcttaaggaaaaaatagacacagaacagcttgcctttgccctgtagagctctcaggtaggttcaacccatcctgggaattggagtgatttcagatactctgaatgcctttggttcccaaactgccatgggcttgctggtggaacaaaaacagaccttgatacccttactatgaattatatatatgattggctaactgaaagcaaaaccataatggaacatgactgcagacacgtatatattctccaggggttccatgttttgttggggaaaacatatctcaccaggtgaatggcctcaatggctgaaggcagcatgaaccctaaactcttagatacttggataattcattgggaacaacaacagacagagttgaagctagtctttaagaatattccctacaagccagcacaggcaaaaatctttcaggtataaaattctcttctttcttactgtagtgtatctttggcaacatgggtatacagactatggaaagcttaagaatgtaagttacattttagtagctctgttggtggaatatatatgtgtccaaagagctttcttaattggatgtgggcttaccctgttctactttagtccagattccttgttattaagctttttattgctgcagcatattctctaaatataatttactcctgataataattaatcaacattacagaagaaagctataaatataaggtgataatataaaatatatatttatatgtcatatattacatagtaaataaaatacatgttaaatcaaaataaaatagtattataggctaaaatatatatgtacacataaacatttagtgtaaatgtgcatataaaaggagaaaaaaggaaatacattaagatgataatactgtaggtaggtagggagattttggtagtttactttttcacatattccaaaatatttaattactattttataacttacataaattgtagaataacttatcttgtttagtaacagcatagagaggggtaaaactggcagaaatggatatgtttgatcaatgttgatccttcaaactacagtgatccacttctgagaacagggactcatatttaatgagggagtaagccaggttcttacagagcgtgagattcagcttctcctgtcatgagatggggtcaggctctgggccaggagagcaatggccagctttggaagctatatctcaggtcacattcaaaagcacacatttccaactcttttcccaacgctgcttttgtcacattagaatgaaatttgccctctgtgttgaaatattctataaaaaacacaatcttgcttaagttaaaatttaaagttagcttgtctgacagctgggatgtaaagagacagtgaaaggattctgacttttggcattgtcagcagtttcccttgagagtggagccctgtctttctgcaacctgcagctctcgctttcctgctgtgactgagccagtgggatcgtcggccaggagagggcgcctcactcagtgagacataaatccaacgcaccctatgagggcactaggaaggtgaaacgcaatcctcacctacacttgctctgctctctgccgtttcagcattccaccttagggcgtcaggcttaactttgcaggtgttaaatctccgtgtgtccatgaaacacttcaagtactatttcagcagcttggagaaatgccaaacacaagtcaggaagttatctccgtcagaggcttgccgcctcacccctgcatggctctcagagaaagcttcctttctgtaagacacattccaatcatcacactgtggctaaaaggctaaatataggagagacatttgccaagatatagcaaagccgatgttggtttgcctaggcaatttgataaatgatgattgtgtgcaggtggtgcctaaatagaccatagactacatattaagataacttatgaggtctgctggagagaatgggaaagtgggtgtgtgtggatgtttggcacagcctggggctatggctataagaacctgagtctaggatttgccatagaatattctgtgagcaaaaaagacacctacttctcagttataatcctcataagaatttttataatattttttaagctgtgcaatccacagctgtgtaactgagaaaaatcacttaacctgtctgaacctaggtttcctcaaatatattcagtctgcactcccaggacctcactttaagagaaacctgaatctcttgagcacgagcatgtggatgggtgttattcccttcctgcacaccttctgtgcttcaaagagagaacttatgtaacctttttcctcatgtatccctgctttgaaacctgtaaatttctatctttctctgcccctttctgacttcttttattattattttcaacctcatcgatttcttcaaattactttccatccactaaatatttctaatgagccctgtacatttttctgtaccactgtggaaaaaaagtaaaataatttctgtcttaacaaaggattgccgcacccatctggcattaaaaggaagaagaaaaagcgggacacattaaaaacaataagcgttgatttctctggctgtacctacagacctgttactgtgaggcctttaatccatcttcaccgccgctttcttcccttgctttgtcttttaaagtttcaggggactgtcacaaacagggtcttactcagggcctcctgctgctgctctgtggccttgttgagcccgtggggctggttcctgtggctcctcctggccagttgtccaccgcaggtgccatggatccaagaattacctctgctgggcacctccctcccacacaatggcaccctgcttccaggacatgctgagtcctatctcaaggcattcttggtcttccctcaatgttgcagagtaatattattttatctagaacattcctgtgttgaagctcagtaaatgtcagcacaagtaggcaaaagtgtattgctttgggtggtaaactttctccatgctctccccggaccccttcttatccactttaccagccatgtgaatgcatcctatagcttctctgtgctttgttccaaatggcctgcccctgtgaccttcttcagaggctgaccatgggccagtccctccctcccagagagagcctggaatgcctggtagtgtagttctagggaagcctatagccaatgactgtgcaagattctgaaagcctgactccctttcctcaaaatggggcaaattctgacataatttatggtctagagctccccaaagatctggctaaggccagggagttggctaaaattgtgcctttctctgttcttcatttccttttctcttgtgttcttctcctggcccttaataaataccctgttcatgatctgtgtctcagagttggcttctggaggtccagccttaggtatttggttaggagtgcaaggatgatttttggaggcagattctgaggatgggattctagagttaagtcaccagctaagtggcaataaataccccatcacagggggtatgtggagcccagaggggccctgacacactagagcattgcagttgctaaaacttttacctggagcgaattaagatgatgtcatgggttgaattatgtaacctcaaaagatgttgaatttcacccccagtacctgggaatgtgatattactgggaaataagatatttgcagataatccaactagaatgagatcattagggtgggccctaattcaatatcactgttgacctcacaaaaaaagtgaaatttgaacatggagacatacatgcttagaggaaagatggtgtgaagacacagggcatccacaagaacaatttgaggccaacagggaggtcatggaacagattcttccctacggttctcagaaccaaccttgccgacaccttgattttggacttctagtctccagaactgtgagataataaattcctcatgttctatgccacccaatttattgtattttgttatagaagccctaggaaactaatacagaagggattctgacagaacaggtatgctagattgtgcaattttctttggcttttgatggtacaaggtaaatggtcattacaaaggctgtggatgggttccatgataaatagactccagttggtcagcataaggcaaagtgagaaagtcaaaaagtcccttggcagctcttaaacaaaccccctttttctatagccaagggagaccatgctgaagaccaggccaggaccaactataagaacagtggacctttggtggctcaggcctgtaatcccggcactttgggaggccgaggcagatggatcacctgaggtcgggagttcaagaccagcctgagcaacatggagaaaccccatctctactaaaaatacaaaattagccaggcatggtggcatatgcctgtaatcctagttactcaggaggctgaggcaggagaatcacttgaacccaggaggcagaggttgcagagagctgagatcacgccattgcactccagcctgggcaacaagagcaagactccatctcaaaacaaaacaaaacaaaaacaaaacagtggaccttcagggacacccagtttacatcctcagcaatcccatgcaacagccaggaacttggtaaggaagaaatggcttcttaagacttggaatcagaaaatgtgaatagatgtcattgataaatgtgaaactgcagctgtccctgaatcctctgggcctgcagaatgggcccacatcttctttctagagggcagagctctcttgcttgaagattggaagcaagtgtacaaatgtaagcagagaagcctaacaagagattaattttatggcttatatctttattagaacttaaatccaatatgtttattagaccttacagttctgtctgagagaaaagagggatatgttaaagtcctcactccacaagatttgtaaccataggcataaaacctttaaaggatatactttatggcagtgcattccaaatttacacgtaaaacagatttctgctattgcatttcaaattcagacataaaacagatttccaacttctttcacctgttgggctggtcccatgtcatatactcaatgtgcagtactcacttctttgagcctcagtaacatgtgagtagaaatgggatcattgtaataaatctacttgcatcaacatatgttccttgtctcataacagccatttatccccaaccttaattaaatatttctgaggggtaactaaagaatactggattgctgttggtttcagatgaaatctgtgcagagtctgtgccatgaagggctctgcctatattttggttacaaaagttatcttattttggcagggtgcaatggctcatacttataatcccagcactttgggaggcagaggtaggagaactgcttgagcccaagagtttgagaccagcctaggaaacatagagagatcccatttctacaaaaaaaaattaattaaaaaaattttataaatttgtaaagctctttgtgcatatattgcctgatgtcatattctcctcaagcagcccctgagatgaggagtcatgtgggagtaatttgttaacaaggtgatctcaaaggaagacagggaaggagaagggaaagaaggatatggaaaagagagaacccaagaaagtgtgtgattttgtcaaagtccagcttcagcctcatccaacttgaggccagggagtcagattgtcagacacttggaccagtcagtcattgcctaagaactgcacagagggttaaagctcccctctcccagctccatgcagagatccttaaagacagtcccagttgcggccgggtctggtggctcatgcctgttatcccagcactttggaaggctgaggcaggcggatcaagaggtcaggagttcgagaccagcctggccaatatagtgaaacctcatctccactaaaaatacaaaaattagccaggtttggtggcaggtgcctgtaatcccagctactcaggaggctgaagcaggaggattgcttgaacccaggaggcagaggttgcagtaagctgagatcatgccactgcattccagcctgggttacagaggaagactcagtctcaaaaaaaaaaaaaagtctcagttgcaggccttcggaagcaaagcacaaagcagttggaagaggcttacagaaagagcaaaagaatgtggggtatctgtgtgtgctgtcaacagtgctattactgtgaatgaatatctgtgtccccccaaaattcatatattgaagcctaacccccaagttgatgatatttggagttggggccttggggaggtgattaggtcatgagtgtggagccctcataggtgtgattcctgcccttataagaaaagatgatctctctctccgccatctaaggatacaagaagacagcatctgcaaaccaggaagggggtcttcaccagtcacagtctgctgacaccctgaccctggactatcctaggctccagaactccagaaatcaatctctgttgtttaaatcgctcagtctatgatatcttgttatagcagcccaaactgactaacacaattatacatgtcaaaatcctttctaatctgtggatctgggctttgcaactttgcatgtctcacagccagcagaggattctattattaatggtaatccatgtcaaatttaatactataagaatttttcataaaatcaatttgtttttaaccttttggctatcaaactagttgtaatttgaaatccaagacaattaaatctttgtaaaatgtgggtctttttgtaagatgactttaaccacagagaaaatgtaaaattttaggaagggtaagacatgtagttagcactgagattactatgtgaggcctaatgttatctatgtgtaaggcaatcatcagtgttacatttcattagaaagatggcttttaaaaaacaactagcgccaaggtgggcagatcacctgaggtcaggagttcaagaccggcttgcccaacatggtgaaaccccatctctattaaaaatacaaaaaaattagctgggtgtggtggcagatgcctgtaatcccagctacttgggaggctgaggcaggagactcgcttgaacccagaaggcagaggttgcagtgagccgagattgctcgactgtactccagcctgggtgacaagagtgaaactctgttaaaaaacaaaaaaaagaaaaaagaaaactagccagcttcacaatggaggcagttccataatttgttgggattttggaatggcagtgagctacatatcttttctttcatgttctaacatatagaaaacaaactaagtctttgtatattagctaactcagcagaacagtctgtgggagattatattgatcttgaatacacagtgcacatgtattggatattgatgcataatttgggtctaatttcttctcgtatctaaatactcgtaaacatttagaatggtttaaatgtacaggctcagaatgactttaataggacctttaaaatttatatttatatatttaaataactgctgatggcactgttgtttataatattaggtttcttgctgacctctcagaattttccttagagcctgagacaggccgactggttggttccctatcttaagattgtctgaaggaaaaggataaaagcccctcaactcaaactctagcttgtctaactctcagccaatcagcaataaaagaccaaggaagctattaattgcaaatttctatttcagggggctagaggctttcccagagtcccatatgtggagtcagacttaaactccaacctaaagttatcttttcctcatttcaacactaaagttcatgcccaggggtggagatttaaaattctaatgctacatgcaatgtatgaagaaacatgttgagccattgtgcaggtgctagcaaaactctccctatacattccctgagggaatccttccctatggaaagaccctatacctaaccgaaccacacagtatctttggggaacagcccactcctttttgctctctcatggctggctccctgagaggtaataaactctcttcattgctgcctctggtgatctctcttgatttctatcctgagaaatcacaagatctcagggcactggtaagaagcttgtcacagattctttgaatttcctcaatggttctgaaacaggagtgttcccttgacccctttgcaggacttgtgacatgagtgacttgtttacttgtttaccatgctgaatcccttatggaaggaagcacatgagtggatgggtgtgggaaccagagcaaatgaatgtggaactggcctgtggctcctctccggcgggagcaagctttgtgtgggttctgcagcagtgtcaaagtgtgttacaatagtcttttagctctgcggtctgggaggggctgtctgcgacccccagagccccagagggcatgtgttacaatcagtgctcctttaacatttgctgtctgtggatggctaagtgttaaccagctcagtggaaggtcagggtgacagccttttacactttgctgtcttggtacctgagttctgatccagcgtccaggaagaatcaggtcacatgaacaaattgaaggtggtgaatgtggaggactttattgagtggtaaaagtgggcctcagtgggaaagggagctggaaaggggatggagtgggaagataatcttcccctggagcccgggtgtctccagctgaactcctctctgaccatagtttctgacctccagctgcttcttctcatctcaatatccagacacttctctcttctgtgtgtgtgtccactgagtctggggcttggggttcttatgggcacaggatagggggtggtgtggggtgggccaaaaggcaacaatcaggtgggaaaacagggatagttctcactttgggctgagggtccaagcttgtgggtggagcccttgccaaagatcctgcccttttctaccagtatttgcctgccttctgtccatttcagttcaagacagtttgtgcaatttggaaacagccagatctaaacagtgtaaaatctggatagtcaggcagaataaggctggaaaaaatatataattatatagaataaagctgaaaaaattcgctgagtaatactctgtgtgtgcacctacatgcacatgtaacaaagtgataatttctatttccttagatgtttcaaaatgtatcttgaacatatgacaaatatttaatgttttctgggtgactacattgaagcccaccactcacttgggacagaaaagtcattttttggtgtgtgattatacttgctatcttatggtcacaacttttaatactacatagaagcattaatatttttatttttcctttagatccttcactgaattcaacccagtctactcaacagttcaccaagagtcttgctatctccaatttcaggatatgctttccatcaccaatacccaggttaatggacactcctcaaccctttgtcagtccctgcccagtgttgcctttgagactgaactctggacagcctttccatgttctcttttctgtaaaaaggagactttttatttctggcagcacttgcctaggagatagcaaagttaaatgttgtgtttcatcacaatcagtctcaactaactaaaactaattaaacactagggattttgagtaacccacctaccctcactagaccctttctttatctaactgaagatgttcatgatcaagaagcaagaggctgtctcacagatctcagccttgtatgaaaggtagttctcagtgcttaattagcaccagcagcatggccctacacttcatagcatttaaaaccttcagttttgcccttaagtccacctatgcagttgtcccctaataagctcagctcagctccaggccacccctggctctgtggcccatgttttttgtattattctttgtcatctctaattagcctcttctgcctcaccactacttaattatttatccttctcagaacttctggcgtgtattgtactatattttacttttaaaatatgttgccagtgttctcagtttgtcatttatatgacatgttccatgacaaagtacatccctaatacaaagccttaagcaatctcattaaggacagattgctgatatctaatttcttttcccattcctagaggcagtggtcttcaaagtgtggcctccagacagcaatatcaatatcatctgggaatttgctagaaatgtaaattcccaagtcccagctcaaactcaatgaatcagaaactctgggtgtggggcccagcagtccttcaggtgtttctaaccacatattcaaatttgacaatcatttactcagggtctcacccttggtagtatcttaataaatgcctgttaggttgactctgataagtctttctctcaagccatcttaaaaagcatggaatccaaaaattccaggaagaaatgagaaaaaatgttacaaagaatgaagtagggattttaggtttatgagcaattagagggaaccgagtcttcacaaagaaacacaatatcctgatttcctgtctcatgcttgattttcctacattgtctcacctcagctgcgtgattccatgtatctcactaacccttctgtttgccttctgtaaggttacatgtagattctgagaaaattctttttcaactttctatctcttattcccatttcactctatgtcttcacagaaaattatcactgcaaagctgagcggtttctggagaatcttggctcattcactgaattctttgggaagggctgcttccctttgcacatcttcactaaacttggacctttttgatgactctcattttttatcaccaccatagtccttagatgtccagtggagcagggaaactgatggttttctgcacaggttgctcggggcaaagatggaagttggaagtaaggaaaagcatggagttggaattggatgctgaatgctgaagcaaaagagtactcaacgtctctatggttttgctttgtgctgggccttcctaaaccttgtgaacacctgataaatgttcatttgattatgtcaagctctttggagcagtagctttcaaccctgattaggatgtcagaatcctttggaagaattttttaaaaatctatgggcatggaacccatccatcagtatttttaaaaatttcccaggtggtttccatgagtagctaaggttgagaaccgtggttttggatttcccacttgatgattttaaaccataacatcactttgcctatttttctaaatattcctctttctacagtcagctttcaaaagtcagactacaactgaatcaaagaattatacaagaaaggggaaactgagccatccttcagcaactccaggaacaaatcaaggtacatataatgatggggtagtaaatgctaataccgtctatcttcttcccttgtatctatccctgtttttgttcccctctttccactctggcttcctattctccctttgtggcaaaatatccactattcttgaagacagcgaaccagcaaacctgctaatattaaagcttcagtgacccaataggtagctacactttgaggaacattttcatttccaaagaaattatctgaagagaaaaatgtctaattcaatgggctgaaatgcaaattgttatgtttcaggctagaaagatatctaacccaaggaacttccttatcatgctctgggagacagtaggctgcctcatggaaggccgttatagatgtccaactaaacattgcaaaaaatagaagcattggcttgggactgagaaatgatattcatttggtgcaaaagtaattgcgatttttgcccttgaaaatgatggttaaaactgcaatgacttttgcatcaacctatggattagtaattgatacacaaagacatgacacatgagaataccaagtgcactgcttggcacatagtagacattcaacaaatgcttcttgctgacaacttttgctttcctcctcaatcacccactttttagaatccttgaaaaaatcttacaaatttttcaaatattcaggaaacttaaataacatcagatttagagaagaattattgactgtagccaatttttggacctatacattttttaaactatgtgatgggaatctcttcattttttagagcaaaatggatgcatatcaattacaaaccttgctaaatcatcctttctatctctgaggcaataaaattcattatcctggttagtttgaggatatacttaacccataaacaccaacagcaagtatagattcagacatttgtatctataatttagacagtttaaaatgcaatattaagtaattcaaaaattgttcaaagctcagtaccttttcacacattaatactttgattatcaacttccttttaaagagtgagtagaaaaggttagtaagtagaaaagagtaaaagaggcctttctttcacaacttgccaagacgtgcattacttatttaaaataaaaaaaaaatgctgtttgaaaaacaagaaggatggcaagaatgaagctccttcatgcaagatacctctgactaccctctaaagacagttactatggcatggtcatagaattactgcaggaaaaaatttgtccactgaggctgcttcctccagaggtaaggtttaacttatggtaacttgctatggatcaacagctcaagatgaagtgtgtggctggcaatttaagtgtaaaattagatttccagtataatcagtcatctgatagcccatctaaatgtattctgcatttgcacatttaattaattatgtcttaattgaaaacattttgctcataatgattggttctaattttattccaaattaaattagtaggggagaaatttagtttgggaatttattgatttatatatatattaaagaaaaagtaaaaataatggattttctcttttcttcttaaaaggaaatatctttctgctcatttagaggtgcaaaggaaaacatttagaactttccagatgaataaattgcatttcatctgaatgaacatctaactttggagatggagagaacattcttttgtattgttgtagatatgcctagtataatattggcataattaatttttcagctacaatgcagattcctgggtcagtgcaaaagaccttgtttatttagaagtgattatctgagaaagtggctcattagtcttagattcttggaatgcacagtctggtctagagattaaaatagctatttaaattccctttatgaaaattgtgcctgacagggcacttccatgtgcagtgaggtttgtatttgcacatctagagcatccaggaaatcagcaaaggtgggttttgtgtctttagatatgctacagttgataaaccctaagattcagatattaactattggataagctcttgcatttcccataactttagctttgaagccattcattaccttaatactaaggaaagaatgtcagaaaatccaaagagagagaattctcagttatgatttttggacatataattggaaagaagtcagatttggcttttacaattagtgccatataatgtcacacaaagtatttcctgcagtgtgctcaaagaggtcaatttgtgatttatttgcaagtcatagttctgaaattactgacttgtgtgtgtaacaatttagctttaacttgggcacttaatttagcattaaatatagctcctcttcaatattgacccttgccctgaacaagatgtcatttcataaacccagttaaacatggtgcctactgtggtttacataccaagacagattaaatgtattgtccagtttcacagatcagcaatgcttctcttcctgtatcactagctcatgataataacataagggaccagtctgtgccagtggatgggccagaattaaaagaagataaatattgatgtcctgcctgaaagaaaactgggcacccaaggtgtcagagagttgtctgatatactgtgacatgaatgtcccatatatataaattgcagcctttttaaaataaggtagaattgtttgtggaagattaaaaactctctttctaaattgttgaattaaaatatttagttaaataaatcactgctattttcatcaatgttggagttgtttcttcaagtttgtgtgttttctcaattagaaaaaaagtctaatttgtttaaatagtgagaagtcaacattgaactgttgtctactcaatagccacaattccttatttcttgttcacaatgaataagaaatttgtattgttgcaacaagttcacagacaatggattcctctctcaatctgagaggatgagccatggttgatctaggccatgaatattgtggtagattgtattgtgtgttcctaattctttgttctctggccaggtgcagtgtctcacgcctgtaatcctagcacttcaggaaactgaggcaggcagattgccagagctcaggagttcgataccggcctgggcaacatggcaaaacccctctctactaaaaatacaaaaaattagctgggtatgctggtgtgcacctgtaatcccagctacttgggagcctgaggtgtgagaatcacttgaacccagaaggcgaagaatgcagtgagccaagattgtgccactgcactccagcctggatgacagagcgagactctgtctgagaaaaaaataattaaaacagatgattcttgttccctccccatccttaccttttttttaatgaggaaagaatatttcccagtatcactgactttgggcttggctatgtgactgctctacccaatagaatttggtaggttaatagtaatagaagtaactaagcagaactttaaagaagtttctcctcttcaactcttgcttataaagcattataaaaatcaatatatataaagcattataaaaatcaaatgctctaagtagtctgtgtccttcaacatgggtccaggaatgagagacacctggagcacacctgactctcatctgtagtctaaggtagaactgcggcaaccaattcgcaaaattcatgagcaaggagtaaatgcttgctgttatcggtcagtaacttcttgtcatgtttcttaagcattattggagcaaaagcaaactaatacaaacgttagtgtaattcctttgcttgtgattgatttagagatgaatatttgtcctgtttccaggtaatacaatgtatttaggaagaatgccaaaggagggagcttattagtaggattttgacctctaatgaaaatgatggccaaatatatgaaattttttctttctttggtttttattgtttaaagacataattatttaagttgtgttagttgtgtgtgatcttataactgtgaggaattacatagaatgaaaatggaatgtgctgtggtggcagaacagaaagaagttgggtgattgacattgttgagctctgcaggaaatctgttagtctccatttccggaggtcttgctatgtagaaaaattggatgactttattgcttaagtcactataagaatgttttctgttacctgcaacccaatgcacccaactaataaagtatgtttctagaaatacacttgcctgcactcatttttaagacacacagaccacatacacatggagagatatttttaaaggtcttgtactacataaattgtactattttttaatttaaaaatatgggccaggtgcagtggctcacacctgtaatcctagcactttgggaggccaaggcaggtggatcacaaggtcaggagatcaagaccaccatggccaacatggtgaaaccccatctctactaaaatacaaaaaactagctgggcatggtggtatgtgcctgtagtcccaggtacttgggaggctgaggcaggggaatcacttgaaccctggaggcagaggttgaagtgagctgagatcgtgccgctgcactccagcctgttgacagagcgagactctgtctcaaaaaataaaaattaaaaaaaagataatgtgatttttttatattatagcacatgtacaagactgaaatctgtctcattttttaaagtaactgcctagtactttatgcatgaacatcctttgccttcaaattgaatttgaggatcaacctcagctattttcataaaataaatttaaaaatatataaaaagatgaaaaatatgagggaaacattaagtgaaatggaatttgaattcataagttgtgatatccatctaaatgagtcaccaagagttaaaagatgaaaaatgaaaacaaatactcacggaaataatagaagaaaactttaaaaggtagagaataaacacatgctgtaatgtcactacccactcagtgttaagttaaatggatttgttgagaagactccaaaagcagttataaatgtcgagtatgtgtgtgcacatgtgtgtgtatatgtgtgcaaccctatataaaatattttaaaatcacttttattgaaatattgcatatgtacatctaagaacgaattttaagcttgatgaatttttacattgttgacacagccatttaactatcagctaagagaggaaataaaacataaccagcaactctcacctcattttatattcactatcaatccttactctttttttaatttgagacagagtctcattctgttgctcaggctggagtgcagttgcatgatctcagctcactgcaacctctacaccctgggttcaagcaattctcatgcctcagcctcccaagtagctaggttacaggcactcaccaccatgcccagctaatttttgtaattttagtagagacagggttttgccatgttggccaggctggccttgaactcctggcctcaagcagtttgcccacctcagcctcctaaagtgctgggattacaggaatgagttactgtgcctggcccattcctcttttttaataccccaaaggcaactgatatcctaatttctcacacaagggattggttttgcctgggtgttgaactttatataaagggactatcagtacattatttgccatattgatctacgttattttatgtaacaataatgcatatttattcattgttccatagtattccatgtagaaatagatcacaatttatttgctatttcttctcttaatagatatatttgggttggcttctgttattgttatgaatacgatgctttaaatattctttttctagtaaaaatatgtgcagatttatagctgaacagaaaaagctttgtcttttaacctggatatctggattttttactcttggtgaaaataactgcaatgacatttatcatgtatgatttaaagtcaggaaatgcctcctggtaacctacagggtcagtttttcactgatgggttacaactggcctaattggtttgacaaacctagcttgattacatggacaaggagacataaaaggcttgtggagaatttctcctcgaagccctcctgaaagcatgattcctagcacagaatcttggtggttgacactggagacagaatgcacactctgtgtctgtgaatacttggagccctgggtagctttcaacatgggatgtctttcagactcccagtccatgcccgcactctctttcacttgctgcaccatatcctttgcctttaaataaaagccccatgtaaatatgttctatggaatgtggtggttcctttcaaacatccaaacaggaagcttttcagtatgtatacatttctattgataatacacctaagaatgaatttgctatttgccagttcataaaagtatatatatttatatattgagctttagacaaaattttcaagtaaaatacaaaaagaaatttcttgaaccattagagaataagttactgacctgatttccagttaccaccaaatattttggggtttattccttacaaacaggtttctcctacatgttcacaacacaactgtcagcattggttgtattcccactaataccctgttactgtctaatcctcagaccccattcaagaccctggcactctacattaagctacccctgtgtgtagttaccttcttcactctactctgactccaacacctcatgcttggccaccgtcattcttggatgccatccctgggctctgatctactccctagattatcatccatttcacatagacactcttctcatccttcctgggttaaacccacatgggtgctcaccccactctgctcagtgaggctctgacactccaaccttgctgtatcactgcggtgatgcccttttcatcttgcttgggttctgccaccacttctgtgtggactccttctcctgttctttggctttgatacctggcaccttggagccctcctatacagatgcccctttcagtctatttacaccagaaaatcccacagtgacttgactcttctacatgcaaatcctttttatcccattctgtgccactgccttacatgggtgttctcttcccactagcctgaggggtttagacaccaggtgatggataatacttctgtctggatgctccctcaccttgttttgattctgacaccccacgtgggtcacctacatgcattgaagcccttactcagttgtggcttcaatccaaatgaggcagccttcctctgtagaaggaggaattaaccatttttccctattctaaaaattaatcatttccccaaagagcacgggtttctttcatggagaaatagtgtttggatacaaaggtctagaggctaggtgttctactagggtgtcatttcttctagattctttcacttcacaaagctaagaaatacatatgcatataccaagcaaaacacaccataagggtaaaatgatgacttttttgaggttggaggtcactatctctccatcctgtcttccttagagtatttccttgaaatcttaataggtccaaataacaggtttatgcttttgattttgcagtggaagaatggggactttctgacccttggaagtgtaaacaaatgcctccaaaacttacttgggagtttttcacaagaggactatcttaggatgtagccctttgtctcttgaggagatgagaagttattcttacttctgctttgctaaataaattatgtgaaagtctgcctagacattttagtcacttttgtagtacctacgtgcatagaaatctgaccatgttcatgtagtaataaactgtgttctcttttctatgttggttcagagaggtctttgttagtgttattttatttccaacaaacacacggcctatatttctgtattgttactttctagagatggatgactttggatggtcaaatattgatagaaaggcactagtgaaacataattcagaaaaaacacatttacagatttggtgacaagaaatgaagaaatttttcatgttaagctccaattatctctgaaaggtagaaggaaagtcattagttgagagtatacatggcattggagttggaagttttgagaaaagtggaggcttacaaaattaaaatagttgtttccaataagatgaaatagaactgattaaagaacaaaggagacatgattgctgaggagtctctcagattagttcacgttgatcactgtagtctattgtttcacaataactcattccaaatcaagctgcatattggattcacctgggatcttttaagatataccgatttctgggtgccacctgcagagattctgttgtaatcactcaggagtctgacatcagcatccagatttcaaaagttccccgagtgattctaaagcatcctgaagatcaagaaccattgacccagatagaatgttcattgcctttattgttttccacaaaaacctacccatgtaaagcatttgtgaggatataaaagtttactgaaaattagaaattgagagttgaattggcaaacaaatttagtcaaattaaattctgagttttaatgctttcctatggccaacccaagagtgtggaactttccttgggccttcaccccattgtctccaaactcaaatcatttcactaactcttctccaccttcccagtctctgctttctgaatgccacttcctagtctacctgactctgggaactatcggttggagcaaaagtaattgcactttttgccattaaaattgatgtcgaaaaccacaaattacttttgcaccagcctaataaaacttgttactccataactcagagtgattcagctctcactaacaacctggtgttctccattttcctttagcctggactatagctattcatcacttttgagaatttttaagaggcaacgttcttgcatgtgatctggtttatagaaccaggataaaaggtcagtgttgactccaaagtttcccaggcccgggatctcctcagaaatatgtggcagagacagacctgcaggataaagacaagatatgcagtcttttctcattcactccattgatagctagtaacagccgaccatatctcagttgaatgaagttaaaaagatagatagacaaatagatacagtagagtgtagtccatataatggtttagtatacataggaagtacacaaatacagtaacatctggacaaactagaggatgggagaagaagggaattgagagagtattgcaagaagtgaagaacccagggtttgagctagcctcctgaatccacatgtatagagttgtagaattggagtactacaaaggatgtcagaaatcatctaatctagtcaccctttgttacagactagaaagtagaaatctcatagcctaggagttgaactgaattgaagaaagtcccataacaagtcaggggcagcgccaggattaaattggaatcggggttcattgatgactggcccagcgatactccctcaacaggtaacgaatttctaaggttctatgagcacagctacaggagggattaggccagcaatagggtcgctggtggcagtagaggcctaaacctgcatggcttacacctctgtctgcaaagtgactgactcattccaggcctatctgtgcactctgcagtacctctgctcagaaggtgccaatgggggaaatgctagatagataatttggcttgagcatagagtgtgagggaaggacacatactgaaaataggaaggagaatgagaaacctgaatcaagaaccagcctaacaaatattaggcctttgaattataaagcaggcatattgtatggctttagaaaattacaagatcataaagatgagcaaataagactagaaaattatgactttgggaccttgtgtctgaagtaaatggagaggcactttggggagtggcaggcaatgaaaacacatctaccacctgagatgactcacagaaattcaaaacagcctcttttttttaagtccaattcaaatatagtcaagtgagggagggtacatcatttattctcaactcactgtgtttagtttcttaaaagatggccgaattgtaaaaaaagcttttgaatggggcagttctagtgtcagttgttctctcttttccttttttacttacccactactataaactaccatagatacattctttacattcagttagttagttttacgtttcccaatttccacatttgtaattatagcctaggaagcttctttgcttggagaaagatgttcttatattaaaacataaaactcttcccaagcatccactagttcatccagtaagcaatttcatcattacataccagaggtcagtattgcactattaatttacatgagtgattaatttttactttcccagtaataaagatgagaaacaaaataccaaagattattactatattagagctttggtgttagttccttaagcaagtatcatctgtgcaggcatgcacagatcatgaatggcttaacaaaaatacgaaagaaaaagaaaaaagccatcacaatgaaggtggcctttgttctttaggaagacattcataactcattccaggcatattaattatgcaacttttacacaaaagttactttatattgagaaatgttcacaactagcagtattaacagacatgctggcagtgaattaaaaagataacaatagtttttaaagcctcattcaaatctgcatatctacaatagtgtatcaatttgggatggccaaagttatagataatttggataaataaaataggggctcagcagtaaaataatgactgtatctccagaagctttaagattaatgaaaagaagaaaagactaaaggcagatcaagctgtcatgctgactacagacatagtaaaggctttccacagaaagagaaaatagattagtcttgttttactctggtcaacaaagggtagaattatagaaatggagattgcagctgcatatagatagaattgttaagactcatagctattccaacatctttgcctagggggccatagggagtgccaacatcgagtatcagaacaaactagatgaatgccaaaatctcttatactctaaggttatatgagaaagtgattttgatgccaaagagtaaatattccacaaattccaaacctccttccaggcatatatattcgagtagcaccttctttaagaagtctcccttaatctgagaacacagtttgcttgtgtttctaatactttgaccatacattgtcttttgtcatcttttgaccatattgtacatttatgtattatttagctttgtgttgttatgtcttatctaaaaccaagattcttcttttaggaatacatgttattttatcctctatgacacctagcacaatacaatgaagttagtagatactcagataatatctgtagtctgaacctatttccttatctaaacagtaaggaataagaacacccactttacctgcctcactgagctgttttgaagatcagatgaaataatgtgcctgaaagcactttgaaaagtatagaatgttatacaaatgtaaggcattctaatttcagagggaggtttttctcagttacaacctccatgtcagctcgaataaaggaacattttttaaaacttaatctgaaaagaaacttgtcccttctaggcacaaattataaaactccccaaaaaatgtttgtatatatttttgtttgtttgttcctaaatagtataatgagctatggtctttcagggaaaatgttgctctgatactagttcacaatgtagaaaattgcccttatgtactttcaggaaagaattgcaaacaaatgagctattttcttttctcaagtaaagcgacttcccaagcatgggtggcagctgttcaagtccatctggtcaagaattcactaagatcataatgtgaaagttgctcaagtgcagatttgcacgacagcctgcaaatgttcctttggagacgaaatggtttctcaggtcaatgatctgcatatttaaaagtctctaggacaccctaagatggcggcgagggagacggtgaaggttggctcccgcctgtctgggctctgatcctctgtctccccctccccctgcggccggctcatggcctggcggaggcccgaaccaaagacctccgcaccgccgtgtacaacgccgcccgtgacggcaagggggcagctgctccagaagctgctcagcagccggagccgggaggaactggacgagctgactggctaggtggccggcggggggacgccgctgctcatcgccgcctgctacggccacctggacgtggtggagtacctggtggacccgtgcggcgcgagcgtggaggccggtggctcggtgcacttcgatggcgagaccatggagggtgcgccgccgctgtgggcgcggaccacctggacgtggtacggagcctgctgcgccgcggggcctcggtgaactgcaccacgcgcaccaactccacgcccctccgcgccgcctgcttcgagggcctcctggaggtggtgcgctacctggtcggcgagcaccaggccaacctggaggtggccaaccggcacggccacatgtgcctcatgatctcgtgctacaagggccaccgtgagatcgcccgctacctgctggagcagggcgcccaggtgaactggcgcagcgccaagggcaacacggccctgcacaactgtgccgagaccagcagcctggagatcctgcagctgctgctggggtgcaaggccagcatggaacgtgatagctacggcatgaccccgttgctcccggccagcgtgacgggccacaccaacatcgtggagtacctcatccaggagcagcccggccaggagcagctcataggggtagaggctcagcttaggctgccccaagaaggctcctccaccagccaggggtgtgcgcagcctcagggggctccgtgctgcatcttctcccctgaggtactgaacggggaatcttaccaaagctgctgtcccaccagccgggaagctgccatggaagccttggaattgctgggatctacctatgtggataagaaacgagatctgcttggggcccttaaacactggaggcgggccatggagctgcgtcaccaggggggtgagtacctgcccaaactggagcccccacagctggtcctggcctatgactattccagggaggtcaacaccaccgaggagctggaggcgctgatcaccgacgccgatgagatgcgtatgcaggccttgttgatccgggagcgcatcctcagtccctcgcaccccgacacttcctattgtatccgttacaggggcgcagtgtacgccgactcggggaatatcgagtgctacatccgcttgtggaagtacgccctggacatgcaacagagcaacctggagcctctgacccccatgagcgccagcagcttcctctccttcgccgaactcttctcctacgtgctgcaggacccggctgccaaaggcagcctgggcacccagatcggctttgcagacctcatgggggtcctcaccaaaggggtccgggaagtggaatgggccctgcagctgctcagggagcctagagactcggcccagttcaacaaggcgctggccatcatcctccacctgctctacctgctggagaaagtggagtgcacccccagccaggagcaactgaagcaccagaccatctatcgcctgctcaagtgcgcacccaggggcaagaacggcttcacgcctctgcacatggctgtggacaaggacaccacaaacgtgggccgctaccccgtgggcagattcccctcgttgcacgtggtcaaagtgctgttcgactgcggggccgaccgggacagcagggattttgacaacaacaccccgctacacatagcagcccagaacaactgcccggccatcgtgaatgccctgactgaagcaggggcccacatggacgccaccaacgccttcaagaagacggcctacgagctgctggaagagaagctgctggccaggggtaccatgcagcccttcaactacgtgacgctgcagtgccttgcagcccaggccctggataagaacaagatcccttacaagggcttcatcccggaagatctggaggcattcatcgaactgcactgacctgcccagaacatctgcaccctcacctctcccctctcctgctgagacgggggaaatcaggctggggtatagcagatgctcgttcttgcctccttcaggcaccaatcaggagaagggttctgcctcccatcccctttacctgaagacagggtctgaggtgttagcgagcctttggtgctagaagccttcagggtcacatgccaagaggacagtctttctccgggaagcccactgactcagaaattctgagttaggaaaagacacaagaccttccccacatcctgtctgcctgggttacggaggcctttgccttgttacctagaggtggagggactgaagccattgcgttccttccttgctagaaacacaggaagaagttgaggacggtctgccttcccttgtccttttacatggccaggtaactccagctgctgaatacagtgttaggactgggggctcccgagatgagagtttgaaagtcagggaatgaaaccacctctcatttcttccagcatgatcacgacctgctcctgtgccaccatagtccctggcagacaggcagggctctgctcagggcagcctgccacttgcatagcttttggttagtttggtgttctgtttatttaataagtgggcaggttgcaagcattgcacaggaattctgagattttactgccttttttttttttttaaagaaagttgtttgttggactccgtaagtgaatttcaagcagtgaggattctgtagtgcctgagatggctgaggccacagggagtgagctgtatgtgtgaggaagttggtgagcgagataaaagtccatggtttcgacccctaaaacatgtgtgactgtacatttttatacatctccactctacggccttttacaggctttccaattttacaggcctttccaattttccattctcattagaaagagaactgtgcttccaaacagaaatcaggagtgaccacaaagcctgacaacactttgccacccagcaagaactggcacaattggtttgggtctgcattgccatagtgtccgagttaaaactacaggccactccaccttgcaaacctcacgtggcctctgatttcattgtgggtgcatccacaggtggcgctagctcttttttcagctgctccgaggattgggacctaagtcatcatgaaaaaggcccaggtacagtcttaatgtgataaatccactagctaagacgttgagtgccaagactagccttccagccaaggtttggacaaagtctcaagttcccatgactcagggtaaggtgctggggctgccagaggacctgccccagcaagatttttctcaagagtgagactccatcagcccgggcagacgtgagcaggttcttggctggtgtagacagcagcaaacagcagaagggaagccattctcactacatcctccctgcagtagccacagccaggcccttaggaggagcagcaaccgggggtgtccagaaacatcccgtccctggatggaaactaggtctcgtttggatttttttttcttttttttgccatgttatgaaattatttattaatttacaagacaggttttatctcagccaaggagggaaatggcgtccctgtccctcccaaagcacagagcagagaaatgaggctgtttacatcgcgagtctccgtgctggtgtttaagtcattaaaaagatattcaaaaaaaaagtctctaaatacaggtttatggaataattcataacagctttaaggaactatcatggtatactgggaaagtcactcatattgcaggatagatttcttctgttggctggtgagcatttgtttatagtcggccttgaatctaccacaattttagaagtagttcttttatttctttaaaagcaacattttgggacaaaatattgtgaacaaataaggaatacgactatatttgtgaaaccccttgttaatttccaagtgatattttaaatcttgaataagacatgtatgctcataaataaagaggaaaaagaaataattaaatcaatgttcataagagcttctcagaaaataagaaagagataagtgatagaactataatctacaatctaccctaacagtatatttgcatcacttcttaaactttgtttagtattttaacacgctgtttcttattatatgggaagaatgctgtgaggtagcatgttaatgttttgcagattaataaactgatgttaaaagagattaagtgactgattttgtactttcattatctcaaaagtgcaactaaaactgcacttaggattgccactcctgtcgggggccatggctttggtcctattttctgcaagtctctggatgacgtctgtccacccactgtctctgagtgctctcctcacctcggccttcctcccttattttagtccaacacctgtcaccactcttcagaatcctcatgaaacttcaggaagatcgactgggtagggcttgtttcagaattatcatccagcattctagggctgatttagaattcagagaaagaagcaaaagcacttatcaaagtgtctgttctagaggtaagctcagaggcaccatggcaattcccacatttccccaggatgtcttcagaaatacctgatactgtcatctcaggcccagatatcatccaccagctgaaggccgtgggcaacattcacatctcagagtaaagagtgttttagaagtccatgggcaatcaccagtcatgcaaggagttccaggggccagccagttgttcctttcatgagttaggaggcagtaaggacatcacggtgatcatttccactgaaaacacaaatttaagtccactctgctactcagcagttaatgctgacttctgaaaattatgaagcatttatcactatggtctccttctaggtttatcagtgcagtcagctcagaaaactttcattcctttggtatatccagctccagctaatcaggtagggaacaatgaaaacaggctgacatttgattcagaggttctggaaagaaagtggacctggcaacaaagtgactgcacttacaaccccccaacctaatgtcatcaggatccagggtagaccacctggggctactggggagagaagacagtttcagaggctgtctattataagcagctctgattaacatcttaggaccacaagacaaattatcattggtatttgaaggcaaaagttcatggatgatctgggcctgggtgagtacctgggtctaactcacaagtctcagaaaggccctctgggtccattcccgatatattaacaaaatgcctgaaacacagtggggtttgagcaaatgatagaatgaatgtttatggaaggacggttgtctgacctcttctactatacacttttgagaaaggttctcagaatgtatggttaaagtattgtataggttgagcattcctaatccaaaaatctgaaattcacattttttgaatgctgacacaatgttcaaaggtcatactcaaaaggaaatgctcattaaagctttgtagatttctgatttttgaatttggggtgtcaaccagtaagtttaatgcaaatgttgaaaaattttttaaaaatccaaaacgcatcttgtcccgagaattttggataaggaatactcaaactgcatttcaattgtttgtttgtttgctctgtcttcaaaaatgagccaggtgcagtggctcatgcctgtactcccagcactttgggaggctgaggtgggcggatcactcgaggagttggagacccgcctggccaatatggcaaaaccctgtctctactaaaagttaaaaaaaacacttagtctggcatggtggcaggctaattttgtaatcccagctactcaggaggctgaggcaggagaatcgcttgagcccaggagacagaggttgccgtgagccaagattatgtcactacactccagcctgggtgagagagtgaaactctgtctcaaaaaaaaaaaaaaagaatgagtttcttcaagagagaaattgtaccttgttcatgtccatcactcccatgcataatatggttccataagaactcagtccttatgaaactccactcagtaaggactcagttttttcagaatgagcagaccaagtaagagcaattacttattgtcatgtagctcagatgagaaagggctgggatttgagaaaatgctctattactgaataggatctggatggctggattccatcacagatgtaaagcaagactacagtagtgtgtccaacaagatcgagtgatagcaggttgtagtgcaggtaagtagatatccacgaagggttgcaaatgaagttttgacctgtccaaacagatggatgcagtacaagacaatttatccttacaagaaagatagcaaattggaattaggaatatttgtcatttcagagggtccaagacaatggtccaggatccaggactggggaatcccttcctgaggacgatgacaggtaaaaaaaaggatcaagctgaagctcaaaaatcagacttgggtgccgggagaggagactaaggaacagactgagatccacttaccagagccagggtattgtctctgcataagctcagagacaaagaaaaatgatgaaaccacagctggcagacacgtagtcatgtaaatctccttagcatcattgcaggattcgtgctgaaagtcgaggcaatggtgaagctgcaggagggctgtaggtggtcatagctcaggaaggaagggtctttcagagactagaaactaggtctgagctaaaacatttgcaatcttggatttctttggggatgttcattctactaacaaaccaacaccaatttaatttcctgatgtttattttgggaggtttacaagaattaatttccttggaactgatttttttaaacatccattatagaaaattctttttctcacttgtgaacacctctgaaaaagaagtattatttataaaagttggtacctgttgaactattagagttgtggggaaaagcctttacagggttcacaagaaaaagccttctccaactatgacttacagatgtactcttaaaataatgacttgacatatttatatgtatatcattagtttaatatcttacctaattgtccaacaaactaattcaatgttgtttgcaatgcattaaatgaacaaaagataaacttggtaatagagaatccagaaagcctagtggcccatgaaatcactggatttgcaaagttattttctcttcagcgctgtgcactatctcagaacaaaatctgttggcaaagcactttattggcaaccaatgcgttagaatatagagacattaggaacgccacatggggtccaaccaatgctccatccaggccagcctagtgcaaaagcaacatgagtggattttggagagcgaggttgcctgatgtggtatcagtttgtagtgttggaattatttaaaatatcttcccaaaatcattttgtgaactaacatggaactctatcatttcagacaaatcccttgattttttcccacagctctccctctttgtgttagagttccatacatgtaatgcccaatatgtgaagagaaaattaacattcccctttttctacttgcagacttccaaacatttactgaaaccttaaactcttactgattctttaaactgtccccattccagttttctctacagcaagtagctctcaatgtgtagtcctcagatgggcagcatccactggaaaactgctaggaatgcacattctcaggcctcacccaagatctgctgaatcagaagctctggggtggaacccaacaacctgcattttaacaagccttccagatgactctgaagcatgctccatactgacaactaatgcaatgcattatggtaaatttgcccacccaccctctggcaaaaataacatctaattgcatttcctttttagtttgatgagtacttatctcggtatcttttaattcacctgatgtttctgttggtaacaaaaccaacaaaaacgttgtaaatttggtacactgaaatgcaaaataagagtgaaggagaggacactggtagtgaaatcaacaactataaagcagtttggggaaattcagtttagggacaggcattatatctcaaaaatccagtgagcatcacattataaaagcacggctccaaaggtgacgatttcatgtgaggacccttcagtcacaaacagaggattagctcacgttcattatttccaaatttccctcaccaaagcacacattattaaggcatttttgagacatttttatcaaaatgaaaatgtgtttgacaatggagcaaactgagatatatgaaatatttacttgtttgaatatctgaagatactagaaatgtgtccttaatttactctgtcttatatgaaatgtaaaccaatgctatccattaacttctaaacatgttccaactgatgcatgttgcaactgttccagccctgttgcataggacaagactcagttttttcagaatgagcagacgaagtaagaccaattacttattgtcattgaagtttgtggtttttgttcaaattttataagggtacaatataatgtgtttaatcatcatggtggccactttttatacatagctttttaaaaacttaaatgcaaacttcacaacctttgcctcatactgaatgaggcctcataacaagccctccagatgagtcagtaccagtagaagtctgatttcacattccatgagtgtttgctgaaggagaatacatgtgcctgtgttctgctgggcatttctgaaggatattgacaagcacagcatataaatcctaggctagctgtgtcacagattggcacaatggcagaaagaatatctctgtgaatttacatcccggcagaggcaaatcaatcagtcaactatggagttgattgatttccattgttaaattcaattggaaaaaaaagttgaaattttctcatattctttgtcatctaatatctgtgtttttctctgttcagttactcttctctggatttcaaatagaatttctaataataaacgtgtaccaattctatcatcaagctgtttatgttctttacatttctgttcttgataattatatgctagtctttgaatatgaagataatgcttctgacccaatattcataatgcatgtgcctcgagttgttattttttgcaagagaaataagtttattttgatctgatacattttctttcccagtcttcatgtgaccagcagcaccaactgcaagactgtctgtcacctgagtgtgacttgcaaccaagcacatgtgggaattcagtgaaggcccctgccttgacctcattatcaacaggaaccagccaaagacagtggtcactctttatccatgtaaatagacaccgtaatttattttcaaaaaaatccaaaggaaaaaatttaaggccattataataccagaaatctgcactgtgagtacttggaagatgacagttgataaagctgggaggtttacaatgactagattgtcagaaggggttaaatgtatgttctaataataagagaacaagaaaaaagaatgccctggtgatgtgtaaatttaaaatacagtggtacattttaggaaaaccaaaaatcaatccatgaactttgaaatgaagggagatagttctgagagaactagaggaactggacttgagatccaagattacaatttactcaattttttatagatactttaagtatggaaaatttaattttattcttatagatagtaaggtataatacagaatataaagtccattaaattaaggtgattatagatcctggttttcttgacactcctatatcatgctgatggttcctgtgtgaatattaacattacccccttcaattcacaagtgtcttgcactgtgtgtgtgtgtgtgcgcgcacacgtgcgtgtgtagcttttggttttattcttgtttgtttgttttgcaaaaatgaaataatagcaaacatgtgatcctgaaactttcttcactgaatacgtatcttagaatctttatttttcttattattcaaaataattcattttttaacctactacttactcatcattgaatatagttatttaatcctcttttaaaaccatttgaattgttttaaattttgtcctactgcaaataatttcatcatattcttttaacctataactgcacatatgttttagtatttctgtaggttaaatttttggaaatggtatcagatcaaaaaagttaacattaaagtcataatcaatattcccaaatgtagacacatttttgaatcttcaatttaatcactttcataaaatttcaactttccttaataatacttccaatttaaactaaggagctttaattgtttaggaccacaaagatttctatcagagggaggacaaaacgtgaaatattttgttttgtaacttatttgttgcaaaaaaacatcactgctgtttggaaattgagaaactgtccaaacaagtacactatggacaacaaatgtcgtgaactgcctgtccacactgaggtttgagagccacaggagacttgagacttcttctaagacagtttaaagaagtctcatttatttgtctttttatacaatgtagcaaatcaatatattaaataatataagaacactaagctttcttacatataaaactagagtaacctatcaaacaaagctgttccacgtaactgagaactcattaaccctgaggtactaggaatatatgaagtcagtgcaatagcaggcgatagcctgtcacgtgcaactagggctgctggtggggaaaagtacaacatcccagattcgtcagtgatgtggctggattgttgggtgtgagaaatgcaccagccctgactcagagatgccctctcttgctcatcttcctgtcattctggtgctgaacacctgtgcccacccatagtgacctgtgaccgagggcatgggcaccaacaccttccctatctccctgtcttttttctttccctcttttccctttattcattccactatccttcttcctccccctcacaaccccaactcttttcatatcatcaacaaatggcaagtacaggccctgaggaagacacagatgactaagatggagcttctgcccttgaaaagcccctgatctagtctgggagactgacatataatcagaggatcagatagcctgatgaataccatgatcatgtgcctgacaccttagagtaaagaaaatgtggcatctcatgttgctaggaggaatcaggacagctttgcagagcaccaggtgtttgtgatgcatctgcaagttcattgtctttgagtgtaggaaaccaccattggagcatataggctggacctaggaaccctgggctctgcaccaaacacaggctcctgaatggaagataggtgacattgtcactgtcctcagtccctgccctggcttgcctagaatgcaataaattaagttgttataggtggtgtgtacttgtacctaaagatgtcactgctagctgagaggaaataagcccctgaagattgttagggcagtgaaattattctttaagatactgttatgggaaatatatgacataatgcatttagcaaagcccatagaaccgtacaacacagggactaaatcctaatataaactgtggatgttagttaatcataatgcatgaatattggttcatcagttgtaacaaatgtgccacaccaacacaaaatgttaacaataggaaaaaccagaggctggtgggggaagagagtatacaggaaccccatatattttgctcacattttctgaaaacctaaaactggtctaaaaatcaaagtctattaatttttttaaacaccttgaaacagtatgtctatcttctattagttccctgcctttgtgaaaataagagcagacttttggtttttcttctttaggacaagaattatatttttataataactcctccatttcttttgatatatctaattatttctttaataactggatcaaacactttaatattaatgaaggtagagccaataggatatcctggtagattggaagagacagtgagagaaacagaggcataaaggatgatgctgaagtttttggcttgagcaagaagaagcagggctggtactagggtgagccaagtgagatgctgagggcatacaatttaaggaggcccttgcatagccatgcaaaagcaaggtcagcacttccttgatgctctgaatgccttaaagtttgtgcctaagtggttggcttacttcactcttgtcctagtcctgactggatcaatgatatcaccatccactgagttggggcaggctgagcagaagcaaatttggggaggctggattgaatatagaagcttggttctggacatgttgactttgagatggccattgaacattcaagtggagacatcaggtagtcagctggatctctgagtctatatctcaggaaagaggctgagactaaagttatgtatttagaagttatcacaagactagatgaactcatgaagaaagtgagtgtgaatggatagttagatggataagggaagagtttcaaggcctgagccatgaaatacttctatttgtcagaaagaaaaagaggagccagcaaggaaccttgaaaaagagcaggcaataagagaaggaacactggcagtgtacattcctggaagacaagacaatgcttcaaggagtagagagtaataagttgtgtttcatgctgctagagttgagttagacaaagcttgaaactagaactttggtgttagtagcattgaggtcatcgacgatgttgactaaaacagttttggtggagagatgacaacagaagcctgaacagagtgcactgaagagagaagaagagaggagagaaatttgattctgcatatacataaaactctttcaaggtcttttagaaagaggaaggaagatagaaagagagagacagacagacagagtgagagagatgagagagaagccagagggggaagagaggtccagaatttaatactttcccagtttttccaacttgcatctcaaccccttatctctgggttttagcagtggatactttgagattctaatatttatctcctcagaacgtgagatgcagaagaggagataggaaattgagataataactactttcttctgatgggtgggaaaaattctatatgagagtttttctaccaagacacatgtgaaaggaagtggcaacatgtggcaattcatctaagatcaacaactttttttctctgtttgaatttgttgatttggaagttatttgtctggctctgcaacagaatcattatttgctctaccaatttttctaaagtctcacatgctgatgccagttaaaaaagaatacattttagtctgtcaacttttgcttacaaaagaggatctaaaagtgtgttccaaggtaatttgaacagactctttcaagatagtgcatattttagtagatccacagaacagtaaatataacttgataatcacccccaacatttcttgcattggaaaattgaattggcaggtttgcataataaagggctaaaattatgaaccacacaagatttgcctgaaacttgattgttcaggctcaaaattctctactgaatactcttgtgcttgcttttgtatttatccattttcatgaaactgcttagggcagacatttcttttttaaatcttttttcataaaaataaattgtaataaatatgccggcggatggtagagatgccgaccctaccgaggagcagatggcagaaacagagagaaacgacgaggagcagttcgaatgccaggaacggctcaagtgccaggtgcaggtgggggcccccgaggaggaggaggaggacgcgggcctggtggccaaggccgaggccgtggctgcaggctggatgctcgatttcctccgcttctctctttgccgagctttccgcgacggccgctcggaggacttctgcaggatccgcaacagggcagaggctattattcatggactatccagtctaacagcttaccagttgagaacgatatacatatgtcagtttttgacaagaattgcagcaggaaaaacccttgatgcacagtttgaaaatgatgaatgaattacacccttggaatcagccctgatgatttggggttcaactgaaaaggaacatgacaaacttcaagaagaaatacagaatttaattaaaattcaggctatagccgtttgtatggaaaatggcaactttaaagaagcagaagtctttgaaagaatatttggtgatccaaattcttatatgcctctcaaaagcaaattgcttatgataatctctcagaaagatacatttcattccttttttcaacacttcagctacaatcacatgatggagaaaattaagagttatgtgaattatgtgctaagtgaaaaatcatcaacctttctaatgaaggcagcagcaaaagtagtagaaagtaaaagaacaagaacaataacttctcaagataaagctaatgaaaattatgttgaaacggaaactgaagctaatttggatacaagaaaaaggtctcacaagaatcttttcttatctaagttacaacatgggacccagcaacaagaccttaataagaaagaaagaagagtaggaactcttcaaagtacaaaaaagaaaaaagaaagcagaagagccactgaaagcagaatacctgtttcaaagagtcaaccggtaactcctgaaaaacatcgagctagaaaaagacaggcatggcttcaggaagaagacaagaatttgagatctggcatgaggaaatatggagagggaattataaattcaacaaccggacaagtgtcatgttaaaagacagatggaggaccatgaagaaactaaaactgatttgctcagacagcgaagactgattgtgtttgtaaaagcttgatgaaaggacagttaagtattttgatcactgcattttgtttgaaacttgtgtcattgatgtattttaaaacttttgtttaagcattacagtatttttctgtgaccatcaattaatatgagggtttgtgctataagagttagagcatatgctatcattgtattctttaagaactttattttgataaaatgtaaatttgttgaaccctgccacatttagtatccccacccccaaaacctgttccaatgaaaaaattaaaacctgttacgaaaaaaaaattcagttaacctattttgtgtctgtaggctgacctcaacactgtaacataacccattaaaatgaattttttttttaagacagagtttctctctgtcacccaagctggaatgcaatggcacaatttcagctcactgcaacctctgcctcccgggttcaagcaattctcctgcctcagcctcctgagtagctgggattataggcacacaccaccatgtccagctaatttttgtatttttagtagaggcggggtttcaccatgctggtcaggatggtctcgaactcctgacttcatgatccacccacctcggcctcccaaagtgctgagattacagaagtgagccactgtgtcctgcctaaaatgaattttctagacgactgaataacagtagtcctttgataggagataatgacttggtttatggccttaatacactacttaattacttaagatgtttattaatagaatgataaatgtacagagtaacctacaagcatgacatacttttgctttcagtagtttcatgtaaagaaaaaaacttgaaaatagtaatacctgaggacccatgggaataacagacactggggaggtagggtggggagcgggaacaagagctgaaaaactacctactggggactctgctcactacctgggtgacaggatcatccataccctaaacctcaacatcacagtacacccagctaacaaacctgcccatgtgttccctgaatctaaaaaaaaaattgaaataattgttttaaaaaagaaaaagacaatagtattacccatgggacaaaatttgtactattagcaagaatcatttgtgtctcatttagaaacaatttgacttttgttccagtgtttaaactttgacaaaaatggttttgaatagatctttataacctgatgccataaatacaagattctctgaaaccttcatttaatatatcaatattgggcctaaaagagtattctataaagcttaaattggtattaactatgatcatcttgatgtctatgatagataataaacaaggtcatacataccttactaaataattttggtttttcaccaacattttatctaaaagatttagactaacagaattatttagcatttcgagtcatgtgctttatttagcaagtgagtaaaaatattggaatattgaagtatttgcataaaaaatcaaatggtagtgttttgtgatctctattgtattttctattaaggtttcatatattactttcccattgtttctgaatttgttatcctatatataaacagaaacatggatgagtaccataaaaaataaataaataaatatgccaaactcactccaatagcatccatcatatcatatgtattatataaatacatattttaccattataattgacaaaccagcaattatgagcttgattctttgtggatgcattaggagagtgtttcttcataggatataatattttgtaatttcttattctttactgcttgctgcgctgtaaaacgtttataaaatgagttccttttggggtgtgaaatgagcaatcatcagaggaaaagcattaaggacaagaaagtggagtgaggatcatgaagcatgtgcatttctttctcaaggtcatgggtaaatttcagctccatggaaaatcttgagaaagaatccagcaagaatgagatcatgaaatgttagctttccccaagtagaaattccataattgaactataaaattgctgcttacaaattttttcttctaaattctacttgaaattagggaattgaaagggccaggagggaccttggaattcatctagtctgaattcattatacataggaaaagttaagctgagccattctgcaagtcacactaatgtgacatagaaaatactagaacctaaggttctgaattactgtttcaggtgttcatctgctacaacaaacacctagtaggtataagagatcatttaaacccaccccaaaggatacaaagttgaggaaatcactctttgcctttgcagaaatcacaatctattatcaaagcatatgatagaaatttcaatatctaaaacacaagatccaaagtgttgagtgccatgagaatgatataagagtttaagaagggagagatacaacaaagtttgggcaagccagtatgtttcttgaaggaatagcacttaatttgtgatgtgaagataaaatctcagtaaagaaaaatggggaagaagatggtaagcctggcagaaggaatattattagcaagtgcaggaaaatatactctaatcaaaaagagcaagtagcctaatgtgactggatttcaatttacctttacatttttctatcatgttatttcatgcccataaattatggcaatagtctaaatgaacttgaatatcagaccaaattgccttgtcttatgtagtaacccactcaagtttctaagcagaaaataacctgacccccattctctgagattttagaaaaaattgtgtatccttcactaaagtttggaatgcattttggaaggaaagaggaaaactgaacgaatatgtcctgaccacgtgtattactcatttgctctgaaagccataccctgcccctttttctgctcagctctgaatgttagtctcagacttaggtttagctaagtgaaggcagaggagcaggcatccaaagggtggaagggaaggagaagccagactatttcttctcactctctgtacttgaggtagcatctcttctctggtttcggttcctgttgtgcagtctttgccatgcttccagcctggcagccttggcatttcctaagcagttccttctccatgattccaggtcctactgaggccccaactcagagaatcccgtagtgccattgcctccctttgtgctccatttctgatatcatagagactttctgttgttgctaacctctgggtgcttcacatttccttattaactttttccactcttccaatataggatattaaaaagcatattactgaaacgttaaaaagcataactgcctttagatataattaaacaaagggcctcaaacaaagtcaccatggacctgcctctttctccctattcctggactcttctgtgctctttttgcattgtctttgctgtcaggctagttctttctgcacaattggaaagatgactgttgcttggcccaagtctacatccttatggctcataatccaaatgaaaaagagattatctattttccagaaaccctgtattaaatctcaaatttgaatttgattgatttgctagagggtagggtgatgaagttctctggtcctggtcattggagaagggtaaatgttatttcagcctcattcaagttttacggagcgaggcatagcatttactcaaaagaagggatactgggcaaacaacagtcatctaatacagacagatgctgaaaattatctatttgctcctccatatccactcttcatccttttctaacctgattttgtgcaaaggaagctcacctccttggccactctcttcctttgtcctctgactttatgtcaagtgcagccaatggagcacattgccatgggattggaaagcaagaggaaagagacttagtggggtttattccacccccacctggccaggcagtgatgtggcagtggcggtggcagcatccctcactgaagcagctcttgctgggtagtatctcccatgtgcaggttccccagtgctctgataagagctcctacctcccccatccctacaggactgatggtaggaatggccttcaccacctctagtccctgggtgcgtcattgcttctagtgggttccttagctttgtccataccctgaatgaactcttgattaaaccctcttcagttatcctttttttagcatgccaactgatccagccaggacctggtacttatgggttaaatgattattgccactttctagctgacaaagccaagcttaaacattttcagaaacttactagagaccacacaatgaggaggaggtgggtttgggactgaaatttttgtttatttgccttcaaaatctggatcttaaaagaacaatttctccccctttgacagacataaacccaagggcatctgtgccattgtcatgtgccttgtctgtctaccttctacatacatccgattatgatgggccagacagacagggattttggcttccttagcaaaattggctcttaagttaaaaggaaaaacaaaataagatggagaatcccctctcctacattcacaacttaatggctgattccagtttgctttttgttaatatgcacattccatttcttatagtctgtgagtaaatgggcctttcataagcccatccaaagggtagcttacaattttcattctgtcccctctccttgcacttttcttaaagtgaatgaattactagttaatgcctgagagagtaaaatccctgatccaattttttcacaatgtatagttttatgtggaagaaaataggagtctggaagatactcagcctcaatgaactttactcctctgaggaaggttagcaagagggataggagtcaggagaggcaccctcattagtcaccagctctgattgtaaacagtgggatcattgcttttaattctttaccatagaactttctctggcaccagattcatgtaagtataattcagaaatgtaagtggataacagcttattgtccaaggttcccaaggaccaaaaaagaaggtgccaaaaatacttaaaagtagccaagtaactctgacctggagtgctgaagttcattccctttctacatcatttgcataatatctccatatccaaatggtatcccagaatacatgaaggaattaggaagtctaaaaagttaaatggaaaataatagcatgggtaaagtgcaattaatgccataagcaggaaaggcaaatacactgatttagctgagatttaacacaactttggaattcaacttggcaaagcaagaggggacattggaaaagccgtaccttgctaagagagaaagtagctttctattctgaagcagctatatatgtgcagtcatagaaggcccaatccacgagagaaatgagcagtctggtttatgggaagaatccaatgcaagaaggcatttacatgtagctaaatcactgatcttgagaggtcaaggaagatagaaaccttatttaatgacaaggtaacaaaaacagaaataacactttttaaattatttttaaaatcttacttgtgatgcatattaatgtcccagagttgtgtgggcttttctccagaagtacagattcacaaagggttatttatttatttatttatttatttatttatttatttattatactttaagttctgggatacatgtgcagaatgtgtaggtttgttacatacgtatacagatgccatggtggtttgctgcacccatcaacacatcatctatgttaggtatttctcctaatgccatcactctcctagcccctcaccccataataggccccattgtgtgatgttcccctccttctgtccatgtgatctcattgttcagttcccacttgtgagtgagaacatgcgatacttggttttctgttcctgtgttagttttcttagaatgatggtttccagcttcatccatgactattttgagaaaagtttagagtaaaacaaaggatagaccaagggcctctgtggtcagagtttgtgctctgaaagggggtccctctctccatggtgctaggcagtcacagtgatacacagacaaaacagaaatgatctccctgttttcttcaacaaagttccaattactcccagcatcttcacaatgggtgagaatgaacctctgttgagtgcaacatgctccgtggtttgtgtttctttacttttttgttttgctgcaaggttgcaggctcctttgtagtctacaaacaccttgagagcaggaatggcctttattcatcattgttcttatttcttagctcaaggcctggacacatagcaggcatttaataaagtgagttctgttaacctcatctttaaatgttgatgttgttttcttttcaggagaaaaacttatttaggtcacagacatacacacataccacatgcattcacactccagaaaagtaaatccaacacatacacacacacaaagaacaactgatgtaaaaaataataatggtaaattgaaggcaataaaacatttatttttatactaaaattaaaaaaataagatatgaagaaagctgagcataagattgacatatacagaagctacaataaaacagacccacaaagcattatttcatgtcttcatgtattgattttttttctctaacatggggaatgaggtaggttttccattgcctcccactttctgttggctgctgatggctacatttccttttctgagaatctcacatattgaccatagatattgttgtcactaaataaaccacaggcaccattaatcaaataggaattagtgaaagggaaagaggtatagtgggttgaataatttttccctaaatttatacgcatctgtgtcttagttcatttgagctgctataacaaaaataccatagactaggtaatttataaacaaaagaaaatttattgctcatagttctggaggctgggaaatgcaagatcaagatgacttcctattcagtgtttggtgggggtttactcactgcttcatagatggtgccttctcgctgtgtcctcacatggcagaaaggttgaccaaggtccctgaagcctcttttatagggtattaatccaattcatgaggaatcagtgttcatggcttaatcaccccccccaaaaaaaaagccacatctcttaacactctcatattggggattaagtttcaacacatgggctgggcatggtggctcatgcctgtaatcccagcactttgggaggctgaggcgggtgaatcacctgaggtcaggagttcgagaccagcctggccaacatggtgaaaccctgtctctactaaaagtactgggcgtggtggcacgcacctgtaatcccagctactagggaggctgaggcaggagaaccacttgaacccaggaggcagaggttgcagtgagctgagatggtgccactgtactacagcccaggtaacagagcaagactctgtctcaaaaaaaaaaaaaaagtttgaacatacgaattttgggggtatacaaacattcagagcattccaacctggaacatcagaatgtgaccttatttgaaaagagaatctttgtagatatatttgggatataaaaaggattctgggataaaaccaccctggatttacagtgcatacaaaaatctagtgtaatgactggtgtctgtatgagaagagggaaaaatacagagacacagggtataaggccatttgtaacctctggcagagattggagttatcctgccacagaccaagaaatgcaaaggcccagaagaagatgaaagaggcaaggaaggattgcaaccttccaaggaagggtgtccctgctaacaccttgattttggacttctgaccttcacaacagtgagagaatacattcttgttgtttaagccacccagtttgtggtactttgttacagtggcctcaggaaactaatacaggaggttttttgtttagcatattacaggatattgacttgagtaggaactcagatttcacagacagatagttggatgaggtctatgtattaacaccacattgaatataaactctatgagtgagaagcattgtttccaggaagagcaaataccacattccaaccatattgatggttgttgagtcagggccctcttattctatgagattcctgtcgaaacttccttatcagcaactgtctggctgagagcaagaataatcttttgcctcttttatacacagattttatgtagttaattaaataaatgttaatttaaattaataaaaatcatactaaagcaatttctaaaaatatatttatcagccacttttttttgtaggtcttcaatagaataatgaaatccatgtaaaatcctcgggttttcagagtttcatcttgatatcttagcattctgtcaaactataggctgagggagaaacattctgcagcttcccttagaagacccactttggatccacctttccgcagaggcatttttcaggatttctgtgtctagatttctccctgggaaaaccagggataaaaccatcagtcacatcacttgcagcccagggaatgttcagctggcacacgtgactagatcagtggtagaaggcatgcaggacttaggatttcacatttctttacgtttgacctttacatttctaacaagaaaggcattgtttattaatgtcttcattttacacaggaaaaaaaatgaagatcaggatagttaaggcagtaattttcctatgtttttcactcttttgaggaacgggctggccctgggagatgggatgcagtgagaaggaagaaaaggcagcctagcttttatctcatcaaagtcaaaagtcttatggacacacctttgcaatacctctcctggaagtgacttaagtgttatgtatttccacatgcccttattttagtaatttttccatgggaaaacaaacccatgactcagtaaaatttgacaaagtaaatcacctaaaatttcacaacaaaactccccctaaatggcggtgggaagccatagttagaaacaaattttggcctactatttttcaactaatttttaaaatagtggtaaaatacacataacataaaatttaccatcttaaccattcttaagtgtgcagttcaatagcgttaagtgaattacattgttgtgtaatcaatgtccagagcttttccatctgtcacaactgaaactctatccccattaaacaactcctcattttcccctctcctcagctcctggcaaccataattctactttccatttctatgcattttattactttagacacttcatgtaagtggacccatagtatttgtctttttgtggcttgcttattttacttagcatgtctgcaagatgcctccacgttgtagtattgtgtcagagtttcattcccttttaaggctgaataatattcatatatatatatatatatatatatataaattttgtttccattcatctgtagatgaacacttgagtagtttctaatcttgactattgtaagtaatgctgctatgaacataggtgtacactctacctactacttttaatcacaatttaaacccttccattttgagaaaagttgtaaaataacagaatatgttttgtttagaaaattaatcatttttattctcagatatgagaacaacacaaagtatttttctttgaagttcataaaatgccattgcataatttatttttacataaaaatactttctgggttgagcatggtgactcacacctataatcccaacactttgggaggctgaggtgggaagatcacttgaggccaagagttcaagaccaacctgtgcaagagagtgagaccttatctctacaaaaactttaaaaaattaaccaagcatggtggtggatgcctgtagacccagctactcaggaggcagaggtgggaggatagtttgaggccaggagttcaaggctgcaatgagctataatcatgccactgcactccagcctgggcaacagagtgagaacctgtctcaggaagaagaaaaagagaaggaaggaaggaaggaaaaaaagaaagaaaaaagagaaagagaaaagaaagaaaggaagaaaggaaggaaggaaggaagaaagaaaaagaaagaaagaaagaaagaaagaaagaaagaaagaaagaaaagaaaaaagaaagagagagaagaaagaaagaaagaaagaaagaaagaaagaaagagaaagaagaaagaaagagatgaaatttcagagtacgttgctactttgaattgagttgtgcattgggaagcatcagtctcccagggagggacagagagctgataaggtagcatgcattctcccaaatctgtcccacccagggaataatgtgctagatttttctgacatgcttctggagggtgaaaatgctaaaagtccctcgcagaatcatttcccattactaaattcacctagtttattacatctcatgaatgaaatttttcaattaagtctttcccttgtttttgttgtgttgtaactactttaggatgactgttctacttagagatggtatcttagtccatttaggctgttacagaaatttttgttacaaaaataccataaactgggtaggttataaacaacataaatttatttctttcagtactagaggcttggaaagctgagattaagtcactatcagaatcagtatctggtgagaccatttcctggttcacagacaatggctgtcttctctctgtgtcttctcctgcaattgatttctcttgcagtggatctcttgcacgtctttgataagagcactaatctcattcaccaattcatgaatcactaatcacttatgaaaggctccatctcctaatgccatcatattgggaattagaatttcaacgtaggaattttgggggaatattagtctattgttcatggtttgatgacctaattctcatggtggttttaacccatgctcccttttaataaacataaaatgttgtaaaattatatactttttctcatagacaactcccccccttcctcatactttatcatctttaaaatcgctgatatacttagaagatggtttattttctaggcatttctgcagactgattaggtagagcttttatttttctttggccaaagattatatttcttttcttttcttttttttcttttttttttttgagatggagtttcgcttttgttgcccaggctggagtgcaatggcccgatttcagctcactgcaatccacctcccgggttcaagcaattcttctgcctcagcctcctgagtagctgggattacaggcatgcgccaccatgaccggctaattttgtgtttttagtagagacggggtttctccatgttggtcaggctgacctcaggtgatccgcctgcctcggcctcccaaagtgctgggattacaggcgtgagccaccgcacctggccttatatttactttcaagtatatgcattctactttgatcctcctaattctgatcctctctccattacctcctccccaaaaaccttctaaggatcatatcattttaattaggaagttatttggctacattcaaaatatgatttttctttataaatattggactaataactccaatttgtgcacacgacatctgaagaatgttacaaatatgtgtgaactctgtaaggctcccagtccaactttttttttgagatggagttttgctcttgtcacccaagctggagtggaatggtgtgatcttggctcactgcaacctccgcctcccaggttcaagtgattctcctacctcagtctcctgagtagctgggattacaggcacttgccaccatgcccagctaatttttgtatttttagtagagacggtgtttcaccatgttggccaagcttgtctcaatctcttaacctcatgatctgcccgccttggtctcccaaagtgctgggattacaggcgtgagccactgcgcccagcccctgtccaacttttatttcattttcatctttcctaatccagccttgtgttggaagcttcttcagactaaaccaagaaaaccttaggtcttcatgttcatatggggactttaatgttgatatggtgtttgtacactttaaaatatttccacatatgttaaccttgtggtgattctctgaggcatgacagatactattttccttgtttcatagaagacaaaacttgaattacagagaggtgaagtgaccaccctgagggcttccccagctagcaagttcaggataggctgagctggattccaggttctctggcttccagtctggtactctttctgctattccatgctgtgttttctgattgaaaaatcataagtctttggtatttctcagcttggtcaaatttgtttaaagatcacttagctcacttttgtctgagtccataccaaccaagtgatcctttaatctgtcttactgagtaaatgcacccttcctgaagtgagtgagtgccctatggagttaggtgctgagctgagctgcagtcctgggttatttattgccaatttggcatcaccaactctcccttctaagggttcctctgtctttcagaaaagttgggagctatatttgcagaatgcccttcccatatggttacaggttggtttaccaagaagtcccttcccttgctgaagatttggaaggctgaaacaaatgacaggctaaagggggttaaaggcagaaatgtggacaaccatgagatgctaagaggctccaccagaaagccactccttcatcactgcagactgtgatggttgaagagaaatatctggaagttcaaggacaatggacaatgaagaggaaactattcagctgggagctgagctgaggttgtccaccgtggcttcattgacctcagcttcccctagtcttccaatggttgtataggcttcttgacatctgcattaaacctttttaatttggattatctagagaaaccagtttttcttgactaaaccctgactgatagactcattcccatgctaagtgctaacatttggattatgacttttattcttattgctaaagtataatttcaaacgatataattaggacactgatgcaaatataatatgaatatatggcaaggattttgttcaactcattaattaggtggggaaacaattagatattaagaccagttcaaacaatatttgaggagctaggtatttatagaccatttaattttaaaatgttaagatatttgggttatatataaaacttgttaatatcttacagagcaatgcataataacatttggggttatattttccaccaaatcatgtgcctttccatgggacaaaaatcaacatgttaaagtaaaacttctgggaccttcaatagatattttttaaattagcatcatcatcatcatcatttgctatacacgtgataggttatagacactacagtaacatgttctcaaacatgtaattgtcctttcaacaattctgtgaggtggattttgtcatctccattttagagatttggaaactgagcccagtgaccccacctgacctcctcaaggtcatggactgagttagagctgggatttaaatccagatttgtctcacactgaggcctgtgatttcctcctagttcactatcacctaattaattcagatactcctgactctctctgtgttaattaataaaatcagcttggtgaataacaaggttgaaaactaagcaaaggaacataactgaatacaaaatgttattacaaaagattaacggctttgaaaagtaaaagcagtatgaactatgccatgtaaaccttagggggataagggccttagattattcaaaagataaatatatttggaaatttttttaaattttttatttttttaattatactttaagttctatggtacatgtgcacaacatgcgggtttgttacataggtatacatgtgccatgttggtttgctgcacccattaacttgtcatttaccttaggtatttctcctaatgctatccctccccgctcccccgaccccacaacaggccctatggtgtgatgttccctgccctgtgtccaaatgttctcatttggaaaaattttaacaactgagattaaaaatccaaacttgccatttccaccagattacgttttcatggtctgtgatgtgccaagtataaagaataggagtaacataaatgcaggccccaaccaagcagagtctctcaaacttgaatagagcatggaacctacttagtagagggagcgagggagacagagttcccagactctgagcctacgccctctcatccaaaagtttagagagcacagcttgcgagattcatggtcaaaataggcctgatcatttttggtgctagaataagataaattgtgtctttcagttaacatttttctatttgcaacattcttacttcatcctcagccagtgtaaaaatcaaagttttattgtagattaaagaaaataaatgaaaacatggacaaaaaagataaatgaattagtatgagttgtggttaagggcatagactctggagtcagaatgtctgtgttcaaatcctgactctactgtgtcctgtgaaactttgggttggtcactcaacctgtctgtgcctcagtgttgtaaacgtccagtgggtttaccttggccactgcctagacagagccaattaatcaagatgggaattgcaatagagaaagagtgaattcacacagagtcagctgtacaggagactggagattcattatttctcaaatccatctcccagagctttcagagtttttaaggataatttggtgcatggaggaaggccagtgagtccagagtgctgattggttaggtcagagacaaaatcatagggaattgaagctgtcctctttcactgagtccgttcctgggtgggggccacaagatcagatgagccagtttatcgatctgagtgtttcaataaactgggtgccagctgatccatcaagtgccgggtctgcaaaatacctcaagcactgatcttaggagcagtttagggaggattagaatcttgtagcctctagctgcatgactcctaaaccacaatttctaattttgtagctaatttgttagtcttacaaaggcagtctagtccccaggcaagaaggaggtttgttttgagaaaggggtgttaacatcttcgttttacactataaagtaagttcctcccaaagttagttcaccctacacccaggaatgaacaaggacagcttggaggttaaaagcagatgcagttggttaggtcagatctctttctcagttataagtttgcaatagctgtttcattgtcttcatctataaaaacaggactaataagaattatacctccgttcgtcaacaccaacatctttgccaggaccaagatagaccccagcgccttggtgcaaaagctggagctggacgtaaggagcgtcacttccatcaggagaggtgcagaggccaagaccgttttgcccaaggagaaaatgaagctgaggcgtgagcaatggttgcagaaaatcgaagccataaaactggctgagcagaagcacagggaggagcggaggtagggggccaggatggtggtgggggacctgcacccgctcagggatgccctgcctgagctactggggcttgaggctggcagccggcgccaggcctgcagcagggagagcaacaagccctggccctcagagctcagccggatgagtgcagcccagagacagcagtttctcgaggaagaaaggacccggtttcaggagctgctggccagtccggcctacagagccagccccctgttagccattgggcagacgctggcccggcagatgcagctggaagatggtggccagctctgaccagggcagcgggcatgccacaactcctcgggacacatgtgtgggccaagtagacagcaccagcccctcaaggaccatggcctgagcctggtggacgcccttccctctggtcggttgtggggctcaataaatggctctgtgaacttcccctgcacccccagggccattcccatgagctgctccctgattcacagggctgggcccaccctgggacagctgcccccgctctcctcaggacaacaagccacatccctccactgggggccccagcccccacgcagtcagggtgtaccgtgcacagggttcgtagggactgcagttgtggaggccccaagtccgtccctgagcaggcactggtgccgccaagatagtctcctggctgtgttggaaaggaattgtgcctgggtgtggccccagctgtgccaccagccgccctgatttgcttcagcctcggttcctgctgcgaccctggtgggatccagaagcactgaggcctgcaggggctggcgtggggactggcttggggccctccccacctgggtgtctgtttcccttccagtctcccctgccaccctcagtgaccagggacacagatggccctggcaaggcccccggcctgctccttgcctgttgtctgcacccccctgggctgcatcccccctatcccacccattgccctcgccctacccagctgctccaaacccaggcagcccactgccttgctctggggacggagagcagagggtccttctgcagggaggagacgtggagtgggcccagccctgaagttcttgctgacccagaagtgagagaggtcctcctttgttgctagaagccctgggatttgggggttggtttttggactgtgaatcagtgactgatcagttcttgttttcaagttgtggaaaccaagggggtggtgcgtccccaggcccctgacgcccagcttggctccccctgcccgagctccccccgtcccagtgctctgtggggcctcgctggcccatgtcctgcagcagagctgggcaggctgggtgtggtggtgcaccctgctgggggtgtctgggaagtgcagagcaggaccactctcagctcccaggtgggggcccagcaccctgagccttcccaggctgcctggggtgggggtggtcccagggactccagggcctcctggctccagggcatgtgggtggcccctgtgcacagcccctcttgttgtgagcccccatggtccgacctcccctggccctgctgcctgctcagggttcatagccccagcagccctgccaaggctgcctggagagtgggtggccgaggcgagttggagcctgcgtcccttcttttcagtgtcctggcccttccctgacacgagcagacacggcatccacagagacagcctggacaccctccaaggccccagccgatgggacagacaggcgtacaggagccacaggcagcagatcccatgctctctcagccggggccggcttggctgcccagccccagctccttagagaacgggcttctggcttcagaggagctggtcacaaaccaatgcttgcgacaaaaccatttttgtggtagagcgagtgttgggaacaacgtctgtgggatgcacgcagggaagtgtggtgggggtgcggatgggggcggcttccactttctccagcatcctaatcccacggtctgggtttcttgtgaaaaacctggccaggcgcagtggcgcacacctgtaatcccagcactttgggaggccaaggcaggcatatcacttgaggccaggagttcaagaccagccaacatagtgagaccccatcttgacaaaaaaatacaaaaattagccaggcgtggtggtgcgtgcctgtactcctagctactggggaggctgagatgggaggattgcttgagcgtaggaggccatggctatagtgagccaagactgtgccacagcactccagcctgggtgacagagtgatcctgtctctaaaaaataaaaatttaaaaacgcaaaaaaaaaaaaaagaattatacctcatagatttctatgagaatgaaatgagctaagagtcataaaatgtttgaaaaactagctggcttaaataagtattcttattttttaaatatctgttaatgaagtattagttagcttttttttttttttttttttttggtaataagcttgggtattgaccctaaggaatgttttgcacttaaggtagagtttgcctataaaaatccagcctgtacattttgagaaaagggatatcagacacttgattagctctatgtggtctttgtatcagaaattaaacaccagctgttgtaagagataaagcctgacatctcagtggcttaacaaaaagagatgtttatttttcataatgtaaaattcaatctgcaacaaggattagggtgagagtgggatctatggttgtattagtctgcttaggctgccataacaaaataccatagactgtttggcttaaaaaacaaagcatttttaaatcacagttctggaggctagaaattcaagattaagatgctgtcagggttgatgtctagtgagggctcttttcctcgctatcgggggaaccagcacccaatatttcaacataggttctttctattttccctaagtgtcggctggtctgagaaataaagagaaagaatacaaagagagaaattttacagctgggcccctgggggtgtcatcacatattggtaggactgtgatggcaaccatgagccacaaaaccagcaagtttttattagagattttaaaaggggagggggtgtacaaacagagagtaggtcacagggatcacatgcttcaaagggcaatacatatcacaaggtgaaggcaaaattagaattactgatgaaggtctatgtcccactgtgcatgcattgtcttgataaacatcttagcaggaaacagggttcgagagcagacaatcggtctgactagaatttaccaggctggaatttttgaatcctagtaagcccaagggtactgcaggagaccagggtgtatttcagtccttacttcaaccacataagacagacactcccagagcagccgtctacagacctacccccaggaatgcattccttccccagggttatcaattattaatattccttttgaaaaagaattcagcgatatttctcctactcacacatctgtctataggatctctgcaagaagaaaaatatggctgtattctgcccgaccctgcaggcagtcagatcttatggttgtcttcccttgttccctgaaaatctgttactctgttctttttcagtataagcagagatatcatgcacaaatcgggtgatgaaatccactgatttggtattgttcaaacacgcatattttacaatcagtttatataatagtggtcctgaggtgatgtacattctcagcttacaaagataacaggattaagagattaaagacaggcataagaaactataagagtattgattggggaagtgataaaagtccatgaaatcttcacaatttatgttcagagattgcagtaaagacaggtgtaagaaattataaaagtattaatttggggaactgataaatgtccatgaaatcttcacaatttatgttcttctgccttggctgcagctggtccctccattcggggtccctgacttcccacaacatctagctcatagatggcctccttctcactatgccctcacatcttctttcctctgtgctctcaatgctgggcagggggagagagagcatgctctggtctttcttctacttataaggagaagaggagagaagggtctacatagtctttcagagattgaggctgaaagaggatccaccattttcagcatggagcttctgggatctccctgagtgtcaatattcagtagcaagtgaagagaaagaattgtacacaggagggtaagtggctgaggtcagtaatcacttctgcccacttcccacaggctgaatgcagttgcatgccacctaactgcaagggagactgggaaacactgcctacagtgtggaaagaaataaatcttgtgaataactagctattgaatagttctattgaatcttcctcacagtccttggacctcctaggggaaaaaaagtgcaccttttcttaactcttccagagtgttctctagttcatgctacttcaagttctttccccaaacttttctcacctatgttttcctatggggctatctgactcagttcatgggcaatgtgttcctataaagaagaaggagtgtagggccaccttcagcttatgttttagctctagaggatgagagaagagccaacgtgtgtcagtttgaggatggatgtacagtgagtagtgaggggctttttccaccttgaatgcatgagagctcttgagcccctcccactgcattttcagagtcaccagatctgtgcatgatatctctgcttatacaagaaaagagtccctgtgattgctccgtattttctgtcatggtaagaatgaagagcaagagagctaggataaggccctagaaaaaggcaatggcaaagctcagataaatgcctttcacccctaccactatctctccagaaaaccccatgtaaaccttgagcacactgcaaagtcattggacaggtttctctccagcaagaaagccccatgccccctgccagttcactggggcctctcaggcaccattctcaacatgagctattggttgggtctggtatgtaggggagctgccagtgccactgaagtcacgtgataattgtggtctcctggccaggaagcagctgatctagcttggggacagggcaggcaggatgtgccattgattcccttgtgagaaattcctaagaatctactctccatctgcaattaattctcccaggagaattaagagattttttttttctcttttctaaagggaacaaataaaggcccaattatttttccagcagtctgagtttagagtctacaaattctaattttttgtttcctggaaacagtaaaattccattgccatttgttttcttctttaaaatcccctttactgcactttcaaagtaagctttcctcatagccctgaagagcctttgtctttaggttgtcagtaaaaacaagttgccccttttgactcagttggttgagatatagtgtactgaaatgcacccagcaggccattgccaaagttgtggtttttcaatttatgtttgagacaaaagagtccaaggagaattccacttgtgtaggttgcataagagatgacaaacaaagctgaactggataagagtataaagaaagtaagagaagcaaaatgtgtgatagaggccacagatgctgccatatagacagcgagatggtgacaaggtgaaaaggggctgcaaatttattaactggctcagtccttactgagagctctgcaccatatctcctccacacaggtgcagattttgcttttagttttacaaagattagagcaagaaagaagctgcttttaaaacaagaaaaaaaaccactttcagtgcaccatctcgtataatattatatcctattgtaccctgccatggtttaggcatcactgtattctctcattgtgtaatatatatattaagagctaaataaatgtctgtttcattgaaggtaagagctaaataaatgtctgtttcattgaatagttcagctctgctttcacctcttctaattaaaccaacaccacatgccacttgctacctcctgaacaattactacttttgtgtttcttcatttatccaacaaacagctccaaagatggaacattcaactctaacataaaccctgctgcttccaggggctctgcgcccatccccttgttatgctacactgacatttagacctactagaaggtaactgtttttcatttatgtgtccttacaagtcccaataagagtccctgaagaaaaaaggtacattgcatacccaacatcaattacatttatcttccctcatatgcaaagcatcgtatgtttccacattcaagaagcaaactcatgagtcatcatgggaacaccatgacttttagattcagactgatctatattcatatgtggaactgattccacattacatgtctagctgtaaaactgggagtaatgtatgtatatgacctttgtagatcnnnnnnnnnnnnnnnnnnnnnnnnnnnnnnnnnnnnnnnnnnnnnnnnnnnnnnnnnnnnnnnnnnnnnnnnnnnnnnnnnnnnnnnnnnnnnnnnnnnnnnnnnnnnnnnnnnnnnnnnnnnnnnnnnnnnnnnnnnnnnnnnnnnnnnnnnnnnnnnnnnnnnnnnnnnnnnnnnnnnnnnnnnnnnnnnnnnnnnnnnnnnnnnnnnnnnnnnnnnnnnnnnnnnnnnnnnnnnnnnnnnnnnnnnnnnnnnnnnnnnnnnnnnnnnnnnnnnnnnnnnnnnnnnnnnnnnnnnnnnnnnnnnnnnnnnnnnnnnnnnnnnnnnnnnnnnnnnnnnnnnnnnnnnnnnnnnnnnnnnnnnnnnnnnnnnnnnnnnnnnnnnnnnnnnnnnnnnnnnnnnnnnnnnnnnnnnnnnnnnnnnnnnnnnnnnnnnnnnnnnnnnnnnnnnnnnnnnnnnnnnnnnnnnnnnnnnnnnnnnnnnnnnnnnnnnnnnnnnnnnnnnnnnnnnnnnnnnnnnnnnnnnnnnnnnnnnnnnnnnnnnnnnnnnnnnnnnnnnnnnnnnnnnnnnnnnnnnnnnnnnnnnnnnnnnnnnnnnnnnnnnnnnnnnnnnnnnnnnnnnnnnnnnnnnnnnnnnnnnnnnnnnnnnnnnnnnnnnnnnnnnnnnnnnnnnnnnnnnnnnnnnnnnnnnnnnnnnnnnnnnnnnnnnnnnnnnnnnnnnnnnnnnnnnnnnnnnnnnnnnnnnnnnnnnnnnnnnnnnnnnnnnnnnnnnnnnnnnnnnnnnnnnnnnnnnnnnnnnnnnnnnnnnnnnnnnnnnnnnnnnnnnnnnnnnnnnnnnnnnnnnnnnnnnnnnnnnnnnnnnnnnnnnnnnnnnnnnnnnnnnnnnnnnnnnnnnnnnnnnnnnnnnnnnnnnnnnnnnnnnnnnnnnnnnnnnnnnnnnnnnnnnnnnnnnnnnnnnnnnnnnnnnnnnnnnnnnnnnnnnnnnnnnnnnnnnnnnnnnnnnnnnnnnnnnnnnnnnnnnnnnnnnnnnnnnnnnnnnnnnnnnnnnnnnnnnnnnnnnnnnnnnnnnnnnnnnnnnnnnnnnnnnnnnnnnnnnnnnnnnnnnnnnnnnnnnnnnnnnnnnnnnnnnnnnnnnnnnnnnnnnnnnnnnnnnnnnnnnnnnnnnnnnnnnnnnnnnnnnnnnnnnnnnnnnnnnnnnnnnnnnnnnnnnnnnnnnnnnnnnnnnnnnnnnnnnnnnnnnnnnnnnnnnnnnnnnnnnnnnnnnnnnnnnnnnnnnnnnnnnnnnnnnnnnnnnnnnnnnnnnnnnnnnnnnnnnnnnnnnnnnnnnnnnnnnnnnnnnnnnnnnnnnnnnnnnnnnnnnnnnnnnnnnnnnnnnnnnnnnnnnnnnnnnnnnnnnnnnnnnnnnnnnnnnnnnnnnnnnnnnnnnnnnnnnnnnnnnnnnnnnnnnnnnnnnnnnnnnnnnnnnnnnnnnnnnnnnnnnnnnnnnnnnnnnnnnnnnnnnnnnnnnnnnnnnnnnnnnnnnnnnnnnnnnnnnnnnnnnnnnnnnnnnnnnnnnnnnnnnnnnnnnnnnnnnnnnnnnnnnnnnnnnnnnnnnnnnnnnnnnnnnnnnnnnnnnnnnnnnnnnnnnnnnnnnnnnnnnnnnnnnnnnnnnnnnnnnnnnnnnnnnnnnnnnnnnnnnnnnnnnnnnnnnnnnnnnnnnnnnnnnnnnnnnnnnnnnnnnnnnnnnnnnnnnnnnnnnnnnnnnnnnnnnnnnnnnnnnnnnnnnnnnnnnnnnnnnnnnnnnnnnnnnnnnnnnnnnnnnnnnnnnnnnnnnnnnnnnnnnnnnnnnnnnnnnnnnnnnnnnnnnnnnnnnnnnnnnnnnnnnnnnnnnnnnnnnnnnnnnnnnnnnnnnnnnnnnnnnnnnnnnnnnnnnnnnnnnnnnnnnnnnnnnnnnnnnnnnnnnnnnnnnnnnnnnnnnnnnnnnnnnnnnnnnnnnnnnnnnnnnnnnnnnnnnnnnnnnnnnnnnnnnnnnnnnnnnnnnnnnnnnnnnnnnnnnnnnnnnnnnnnnnnnnnnnnnnnnnnnnnnnnnnnnnnnnnnnnnnnnnnnnnnnnnnnnnnnnnnnnnnnnnnnnnnnnnnnnnnnnnnnnnnnnnnnnnnnnnnnnnnnnnnnnnnnnnnnnnnnnnnnnnnnnnnnnnnnnnnnnnnnnnnnnnnnnnnnnnnnnnnnnnnnnnnnnnnnnnnnnnnnnnnnnnnnnnnnnnnnnnnnnnnnnnnnnnnnnnnnnnnnnnnnnnnnnnnnnnnnnnnnnnnnnnnnnnnnnnnnnnnnnnnnnnnnnnnnnnnnnnnnnnnnnnnnnnnnnnnnnnnnnnnnnnnnnnnnnnnnnnnnnnnnnnnnnnnnnnnnnnnnnnnnnnnnnnnnnnnnnnnnnnnnnnnnnnnnnnnnnnnnnnnnnnnnnnnnnnnnnnnnnnnnnnnnnnnnnnnnnnnnnnnnnnnnnnnnnnnnnnnnnnnnnnnnnnnnnnnnnnnnnnnnnnnnnnnnnnnnnnnnnnnnnnnnnnnnnnnnnnnnnnnnnnnnnnnnnnnnnnnnnnnnnnnnnnnnnnnnnnnnnnnnnnnnnnnnnnnnnnnnnnnnnnnnnnnnnnnnnnnnnnnnnnnnnnnnnnnnnnnnnnnnnnnnnnnnnnnnnnnnnnnnnnnnnnnnnnnnnnnnnnnnnnnnnnnnnnnnnnnnnnnnnnnnnnnnnnnnnnnnnnnnnnnnnnnnnnnnnnnnnnnnnnnnnnnnnnnnnnnnnnnnnnnnnnnnnnnnnnnnnnnnnnnnnnnnnnnnnnnnnnnnnnnnnnnnnnnnnnnnnnnnnnnnnnnnnnnnnnnnnnnnnnnnnnnnnnnnnnnnnnnnnnnnnnnnnnnnnnnnnnnnnnnnnnnnnnnnnnnnnnnnnnnnnnnnnnnnnnnnnnnnnnnnnnnnnnnnnnnnnnnnnnnnnnnnnnnnnnnnnnnnnnnnnnnnnnnnnnnnnnnnnnnnnnnnnnnnnnnnnnnnnnnnnnnnnnnnnnnnnnnnnnnnnnnnnnnnnnnnnnnnnnnnnnnnnnnnnnnnnnnnnnnnnnnnnnnnnnnnnnnnnnnnnnnnnnnnnnnnnnnnnnnnnnnnnnnnnnnnnnnnnnnnnnnnnnnnnnnnnnnnnnnnnnnnnnnnnnnnnnnnnnnnnnnnnnnnnnnnnnnnnnnnnnnnnnnnnnnnnnnnnnnnnnnnnnnnnnnnnnnnnnnnnnnnnnnnnnnnnnnnnnnnnnnnnnnnnnnnnnnnnnnnnnnnnnnnnnnnnnnnnnnnnnnnnnnnnnnnnnnnnnnnnnnnnnnnnnnnnnnnnnnnnnnnnnnnnnnnnnnnnnnnnnnnnnnnnnnnnnnnnnnnnnnnnnnnnnnnnnnnnnnnnnnnnnnnnnnnnnnnnnnnnnnnnnnnnnnnnnnnnnnnnnnnnnnnnnnnnnnnnnnnnnnnnnnnnnnnnnnnnnnnnnnnnnnnnnnnnnnnnnnnnnnnnnnnnnnnnnnnnnnnnnnnnnnnnnnnnnnnnnnnnnnnnnnnnnnnnnnnnnnnnnnnnnnnnnnnnnnnnnnnnnnnnnnnnnnnnnnnnnnnnnnnnnnnnnnnnnnnnnnnnnnnnnnnnnnnnnnnnnnnnnnnnnnnnnnnnnnnnnnnnnnnnnnnnnnnnnnnnnnnnnnnnnnnnnnnnnnnnnnnnnnnnnnnnnnnnnnnnnnnnnnnnnnnnnnnnnnnnnnnnnnnnnnnnnnnnnnnnnnnnnnnnnnnnnnnnnnnnnnnnnnnnnnnnnnnnnnnnnnnnnnnnnnnnnnnnnnnnnnnnnnnnnnnnnnnnnnnnnnnnnnnnnnnnnnnnnnnnnnnnnnnnnnnnnnnnnnnnnnnnnnnnnnnnnnnnnnnnnnnnnnnnnnnnnnnnnnnnnnnnnnnnnnnnnnnnnnnnnnnnnnnnnnnnnnnnnnnnnnnnnnnnnnnnnnnnnnnnnnnnnnnnnnnnnnnnnnnnnnnnnnnnnnnnnnnnnnnnnnnnnnnnnnnnnnnnnnnnnnnnnnnnnnnnnnnnnnnnnnnnnnnnnnnnnnnnnnnnnnnnnnnnnnnnnnnnnnnnnnnnnnnnnnnnnnnnnnnnnnnnnnnnnnnnnnnnnnnnnnnnnnnnnnnnnnnnnnnnnnnnnnnnnnnnnnnnnnnnnnnnnnnnnnnnnnnnnnnnnnnnnnnnnnnnnnnnnnnnnnnnnnnnnnnnnnnnnnnnnnnnnnnnnnnnnnnnnnnnnnnnnnnnnnnnnnnnnnnnnnnnnnnnnnnnnnnnnnnnnnnnnnnnnnnnnnnnnnnnnnnnnnnnnnnnnnnnnnnnnnnnnnnnnnnnnnnnnnnnnnnnnnnnnnnnnnnnnnnnnnnnnnnnnnnnnnnnnnnnnnnnnnnnnnnnnnnnnnnnnnnnnnnnnnnnnnnnnnnnnnnnnnnnnnnnnnnnnnnnnnnnnnnnnnnnnnnnnnnnnnnnnnnnnnnnnnnnnnnnnnnnnnnnnnnnnnnnnnnnnnnnnnnnnnnnnnnnnnnnnnnnnnnnnnnnnnnnnnnnnnnnnnnnnnnnnnnnnnnnnnnnnnnnnnnnnnnnnnnnnnnnnnnnnnnnnnnnnnnnnnnnnnnnnnnnnnnnnnnnnnnnnnnnnnnnnnnnnnnnnnnnnnnnnnnnnnnnnnnnnnnnnnnnnnnnnnnnnnnnnnnnnnnnnnnnnnnnnnnnnnnnnnnnnnnnnnnnnnnnnnnnnnnnnnnnnnnnnnnnnnnnnnnnnnnnnnnnnnnnnnnnnnnnnnnnnnnnnnnnnnnnnnnnnnnnnnnnnnnnnnnnnnnnnnnnnnnnnnnnnnnnnnnnnnnnnnnnnnnnnnnnnnnnnnnnnnnnnnnnnnnnnnnnnnnnnnnnnnnnnnnnnnnnnnnnnnnnnnnnnnnnnnnnnnnnnnnnnnnnnnnnnnnnnnnnnnnnnnnnnnnnnnnnnnnnnnnnnnnnnnnnnnnnnnnnnnnnnnnnnnnnnnnnnnnnnnnnnnnnnnnnnnnnnnnnnnnnnnnnnnnnnnnnnnnnnnnnnnnnnnnnnnnnnnnnnnnnnnnnnnnnnnnnnnnnnnnnnnnnnnnnnnnnnnnnnnnnnnnnnnnnnnnnnnnnnnnnnnnnnnnnnnnnnnnnnnnnnnnnnnnnnnnnnnnnnnnnnnnnnnnnnnnnnnnnnnnnnnnnnnnnnnnnnnnnnnnnnnnnnnnnnnnnnnnnnnnnnnnnnnnnnnnnnnnnnnnnnnnnnnnnnnnnnnnnnnnnnnnnnnnnnnnnnnnnnnnnnnnnnnnnnnnnnnnnnnnnnnnnnnnnnnnnnnnnnnnnnnnnnnnnnnnnnnnnnnnnnnnnnnnnnnnnnnnnnnnnnnnnnnnnnnnnnnnnnnnnnnnnnnnnnnnnnnnnnnnnnnnnnnnnnnnnnnnnnnnnnnnnnnnnnnnnnnnnnnnnnnnnnnnnnnnnnnnnnnnnnnnnnnnnnnnnnnnnnnnnnnnnnnnnnnnnnnnnnnnnnnnnnnnnnnnnnnnnnnnnnnnnnnnnnnnnnnnnnnnnnnnnnnnnnnnnnnnnnnnnnnnnnnnnnnnnnnnnnnnnnnnnnnnnnnnnnnnnnnnnnnnnnnnnnnnnnnnnnnnnnnnnnnnnnnnnnnnnnnnnnnnnnnnnnnnnnnnnnnnnnnnnnnnnnnnnnnnnnnnnnnnnnnnnnnnnnnnnnnnnnnnnnnnnnnnnnnnnnnnnnnnnnnnnnnnnnnnnnnnnnnnnnnnnnnnnnnnnnnnnnnnnnnnnnnnnnnnnnnnnnnnnnnnnnnnnnnnnnnnnnnnnnnnnnnnnnnnnnnnnnnnnnnnnnnnnnnnnnnnnnnnnnnnnnnnnnnnnnnnnnnnnnnnnnnnnnnnnnnnnnnnnnnnnnnnnnnnnnnnnnnnnnnnnnnnnnnnnnnnnnnnnnnnnnnnnnnnnnnnnnnnnnnnnnnnnnnnnnnnnnnnnnnnnnnnnnnnnnnnnnnnnnnnnnnnnnnnnnnnnnnnnnnnnnnnnnnnnnnnnnnnnnnnnnnnnnnnnnnnnnnnnnnnnnnnnnnnnnnnnnnnnnnnnnnnnnnnnnnnnnnnnnnnnnnnnnnnnnnnnnnnnnnnnnnnnnnnnnnnnnnnnnnnnnnnnnnnnnnnnnnnnnnnnnnnnnnnnnnnnnnnnnnnnnnnnnnnnnnnnnnnnnnnnnnnnnnnnnnnnnnnnnnnnnnnnnnnnnnnnnnnnnnnnnnnnnnnnnnnnnnnnnnnnnnnnnnnnnnnnnnnnnnnnnnnnnnnnnnnnnnnnnnnnnnnnnnnnnnnnnnnnnnnnnnnnnnnnnnnnnnnnnnnnnnnnnnnnnnnnnnnnnnnnnnnnnnnnnnnnnnnnnnnnnnnnnnnnnnnnnnnnnnnnnnnnnnnnnnnnnnnnnnnnnnnnnnnnnnnnnnnnnnnnnnnnnnnnnnnnnnnnnnnnnnnnnnnnnnnnnnnnnnnnnnnnnnnnnnnnnnnnnnnnnnnnnnnnnnnnnnnnnnnnnnnnnnnnnnnnnnnnnnnnnnnnnnnnnnnnnnnnnnnnnnnnnnnnnnnnnnnnnnnnnnnnnnnnnnnnnnnnnnnnnnnnnnnnnnnnnnnnnnnnnnnnnnnnnnnnnnnnnnnnnnnnnnnnnnnnnnnnnnnnnnnnnnnnnnnnnnnnnnnnnnnnnnnnnnnnnnnnnnnnnnnnnnnnnnnnnnnnnnnnnnnnnnnnnnnnnnnnnnnnnnnnnnnnnnnnnnnnnnnnnnnnnnnnnnnnnnnnnnnnnnnnnnnnnnnnnnnnnnnnnnnnnnnnnnnnnnnnnnnnnnnnnnnnnnnnnnnnnnnnnnnnnnnnnnnnnnnnnnnnnnnnnnnnnnnnnnnnnnnnnnnnnnnnnnnnnnnnnnnnnnnnnnnnnnnnnnnnnnnnnnnnnnnnnnnnnnnnnnnnnnnnnnnnnnnnnnnnnnnnnnnnnnnnnnnnnnnnnnnnnnnnnnnnnnnnnnnnnnnnnnnnnnnnnnnnnnnnnnnnnnnnnnnnnnnnnnnnnnnnnnnnnnnnnnnnnnnnnnnnnnnnnnnnnnnnnnnnnnnnnnnnnnnnnnnnnnnnnnnnnnnnnnnnnnnnnnnnnnnnnnnnnnnnnnnnnnnnnnnnnnnnnnnnnnnnnnnnnnnnnnnnnnnnnnnnnnnnnnnnnnnnnnnnnnnnnnnnnnnnnnnnnnnnnnnnnnnnnnnnnnnnnnnnnnnnnnnnnnnnnnnnnnnnnnnnnnnnnnnnnnnnnnnnnnnnnnnnnnnnnnnnnnnnnnnnnnnnnnnnnnnnnnnnnnnnnnnnnnnnnnnnnnnnnnnnnnnnnnnnnnnnnnnnnnnnnnnnnnnnnnnnnnnnnnnnnnnnnnnnnnnnnnnnnnnnnnnnnnnnnnnnnnnnnnnnnnnnnnnnnnnnnnnnnnnnnnnnnnnnnnnnnnnnnnnnnnnnnnnnnnnnnnnnnnnnnnnnnnnnnnnnnnnnnnnnnnnnnnnnnnnnnnnnnnnnnnnnnnnnnnnnnnnnnnnnnnnnnnnnnnnnnnnnnnnnnnnnnnnnnnnnnnnnnnnnnnnnnnnnnnnnnnnnnnnnnnnnnnnnnnnnnnnnnnnnnnnnnnnnnnnnnnnnnnnnnnnnnnnnnnnnnnnnnnnnnnnnnnnnnnnnnnnnnnnnnnnnnnnnnnnnnnnnnnnnnnnnnnnnnnnnnnnnnnnnnnnnnnnnnnnnnnnnnnnnnnnnnnnnnnnnnnnnnnnnnnnnnnnnnnnnnnnnnnnnnnnnnnnnnnnnnnnnnnnnnnnnnnnnnnnnnnnnnnnnnnnnnnnnnnnnnnnnnnnnnnnnnnnnnnnnnnnnnnnnnnnnnnnnnnnnnnnnnnnnnnnnnnnnnnnnnnnnnnnnnnnnnnnnnnnnnnnnnnnnnnnnnnnnnnnnnnnnnnnnnnnnnnnnnnnnnnnnnnnnnnnnnnnnnnnnnnnnnnnnnnnnnnnnnnnnnnnnnnnnnnnnnnnnnnnnnnnnnnnnnnnnnnnnnnnnnnnnnnnnnnnnnnnnnnnnnnnnnnnnnnnnnnnnnnnnnnnnnnnnnnnnnnnnnnnnnnnnnnnnnnnnnnnnnnnnnnnnnnnnnnnnnnnnnnnnnnnnnnnnnnnnnnnnnnnnnnnnnnnnnnnnnnnnnnnnnnnnnnnnnnnnnnnnnnnnnnnnnnnnnnnnnnnnnnnnnnnnnnnnnnnnnnnnnnnnnnnnnnnnnnnnnnnnnnnnnnnnnnnnnnnnnnnnnnnnnnnnnnnnnnnnnnnnnnnnnnnnnnnnnnnnnnnnnnnnnnnnnnnnnnnnnnnnnnnnnnnnnnnnnnnnnnnnnnnnnnnnnnnnnnnnnnnnnnnnnnnnnnnnnnnnnnnnnnnnnnnnnnnnnnnnnnnnnnnnnnnnnnnnnnnnnnnnnnnnnnnnnnnnnnnnnnnnnnnnnnnnnnnnnnnnnnnnnnnnnnnnnnnnnnnnnnnnnnnnnnnnnnnnnnnnnnnnnnnnnnnnnnnnnnnnnnnnnnnnnnnnnnnnnnnnnnnnnnnnnnnnnnnnnnnnnnnnnnnnnnnnnnnnnnnnnnnnnnnnnnnnnnnnnnnnnnnnnnnnnnnnnnnnnnnnnnnnnnnnnnnnnnnnnnnnnnnnnnnnnnnnnnnnnnnnnnnnnnnnnnnnnnnnnnnnnnnnnnnnnnnnnnnnnnnnnnnnnnnnnnnnnnnnnnnnnnnnnnnnnnnnnnnnnnnnnnnnnnnnnnnnnnnnnnnnnnnnnnnnnnnnnnnnnnnnnnnnnnnnnnnnnnnnnnnnnnnnnnnnnnnnnnnnnnnnnnnnnnnnnnnnnnnnnnnnnnnnnnnnnnnnnnnnnnnnnnnnnnnnnnnnnnnnnnnnnnnnnnnnnnnnnnnnnnnnnnnnnnnnnnnnnnnnnnnnnnnnnnnnnnnnnnnnnnnnnnnnnnnnnnnnnnnnnnnnnnnnnnnnnnnnnnnnnnnnnnnnnnnnnnnnnnnnnnnnnnnnnnnnnnnnnnnnnnnnnnnnnnnnnnnnnnnnnnnnnnnnnnnnnnnnnnnnnnnnnnnnnnnnnnnnnnnnnnnnnnnnnnnnnnnnnnnnnnnnnnnnnnnnnnnnnnnnnnnnnnnnnnnnnnnnnnnnnnnnnnnnnnnnnnnnnnnnnnnnnnnnnnnnnnnnnnnnnnnnnnnnnnnnnnnnnnnnnnnnnnnnnnnnnnnnnnnnnnnnnnnnnnnnnnnnnnnnnnnnnnnnnnnnnnnnnnnnnnnnnnnnnnnnnnnnnnnnnnnnnnnnnnnnnnnnnnnnnnnnnnnnnnnnnnnnnnnnnnnnnnnnnnnnnnnnnnnnnnnnnnnnnnnnnnnnnnnnnnnnnnnnnnnnnnnnnnnnnnnnnnnnnnnnnnnnnnnnnnnnnnnnnnnnnnnnnnnnnnnnnnnnnnnnnnnnnnnnnnnnnnnnnnnnnnnnnnnnnnnnnnnnnnnnnnnnnnnnnnnnnnnnnnnnnnnnnnnnnnnnnnnnnnnnnnnnnnnnnnnnnnnnnnnnnnnnnnnnnnnnnnnnnnnnnnnnnnnnnnnnnnnnnnnnnnnnnnnnnnnnnnnnnnnnnnnnnnnnnnnnnnnnnnnnnnnnnnnnnnnnnnnnnnnnnnnnnnnnnnnnnnnnnnnnnnnnnnnnnnnnnnnnnnnnnnnnnnnnnnnnnnnnnnnnnnnnnnnnnnnnnnnnnnnnnnnnnnnnnnnnnnnnnnnnnnnnnnnnnnnnnnnnnnnnnnnnnnnnnnnnnnnnnnnnnnnnnnnnnnnnnnnnnnnnnnnnnnnnnnnnnnnnnnnnnnnnnnnnnnnnnnnnnnnnnnnnnnnnnnnnnnnnnnnnnnnnnnnnnnnnnnnnnnnnnnnnnnnnnnnnnnnnnnnnnnnnnnnnnnnnnnnnnnnnnnnnnnnnnnnnnnnnnnnnnnnnnnnnnnnnnnnnnnnnnnnnnnnnnnnnnnnnnnnnnnnnnnnnnnnnnnnnnnnnnnnnnnnnnnnnnnnnnnnnnnnnnnnnnnnnnnnnnnnnnnnnnnnnnnnnnnnnnnnnnnnnnnnnnnnnnnnnnnnnnnnnnnnnnnnnnnnnnnnnnnnnnnnnnnnnnnnnnnnnnnnnnnnnnnnnnnnnnnnnnnnnnnnnnnnnnnnnnnnnnnnnnnnnnnnnnnnnnnnnnnnnnnnnnnnnnnnnnnnnnnnnnnnnnnnnnnnnnnnnnnnnnnnnnnnnnnnnnnnnnnnnnnnnnnnnnnnnnnnnnnnnnnnnnnnnnnnnnnnnnnnnnnnnnnnnnnnnnnnnnnnnnnnnnnnnnnnnnnnnnnnnnnnnnnnnnnnnnnnnnnnnnnnnnnnnnnnnnnnnnnnnnnnnnnnnnnnnnnnnnnnnnnnnnnnnnnnnnnnnnnnnnnnnnnnnnnnnnnnnnnnnnnnnnnnnnnnnnnnnnnnnnnnnnnnnnnnnnnnnnnnnnnnnnnnnnnnnnnnnnnnnnnnnnnnnnnnnnnnnnnnnnnnnnnnnnnnnnnnnnnnnnnnnnnnnnnnnnnnnnnnnnnnnnnnnnnnnnnnnnnnnnnnnnnnnnnnnnnnnnnnnnnnnnnnnnnnnnnnnnnnnnnnnnnnnnnnnnnnnnnnnnnnnnnnnnnnnnnnnnnnnnnnnnnnnnnnnnnnnnnnnnnnnnnnnnnnnnnnnnnnnnnnnnnnnnnnnnnnnnnnnnnnnnnnnnnnnnnnnnnnnnnnnnnnnnnnnnnnnnnnnnnnnnnnnnnnnnnnnnnnnnnnnnnnnnnnnnnnnnnnnnnnnnnnnnnnnnnnnnnnnnnnnnnnnnnnnnnnnnnnnnnnnnnnnnnnnnnnnnnnnnnnnnnnnnnnnnnnnnnnnnnnnnnnnnnnnnnnnnnnnnnnnnnnnnnnnnnnnnnnnnnnnnnnnnnnnnnnnnnnnnnnnnnnnnnnnnnnnnnnnnnnnnnnnnnnnnnnnnnnnnnnnnnnnnnnnnnnnnnnnnnnnnnnnnnnnnnnnnnnnnnnnnnnnnnnnnnnnnnnnnnnnnnnnnnnnnnnnnnnnnnnnnnnnnnnnnnnnnnnnnnnnnnnnnnnnnnnnnnnnnnnnnnnnnnnnnnnnnnnnnnnnnnnnnnnnnnnnnnnnnnnnnnnnnnnnnnnnnnnnnnnnnnnnnnnnnnnnnnnnnnnnnnnnnnnnnnnnnnnnnnnnnnnnnnnnnnnnnnnnnnnnnnnnnnnnnnnnnnnnnnnnnnnnnnnnnnnnnnnnnnnnnnnnnnnnnnnnnnnnnnnnnnnnnnnnnnnnnnnnnnnnnnnnnnnnnnnnnnnnnnnnnnnnnnnnnnnnnnnnnnnnnnnnnnnnnnnnnnnnnnnnnnnnnnnnnnnnnnnnnnnnnnnnnnnnnnnnnnnnnnnnnnnnnnnnnnnnnnnnnnnnnnnnnnnnnnnnnnnnnnnnnnnnnnnnnnnnnnnnnnnnnnnnnnnnnnnnnnnnnnnnnnnnnnnnnnnnnnnnnnnnnnnnnnnnnnnnnnnnnnnnnnnnnnnnnnnnnnnnnnnnnnnnnnnnnnnnnnnnnnnnnnnnnnnnnnnnnnnnnnnnnnnnnnnnnnnnnnnnnnnnnnnnnnnnnnnnnnnnnnnnnnnnnnnnnnnnnnnnnnnnnnnnnnnnnnnnnnnnnnnnnnnnnnnnnnnnnnnnnnnnnnnnnnnnnnnnnnnnnnnnnnnnnnnnnnnnnnnnnnnnnnnnnnnnnnnnnnnnnnnnnnnnnnnnnnnnnnnnnnnnnnnnnnnnnnnnnnnnnnnnnnnnnnnnnnnnnnnnnnnnnnnnnnnnnnnnnnnnnnnnnnnnnnnnnnnnnnnnnnnnnnnnnnnnnnnnnnnnnnnnnnnnnnnnnnnnnnnnnnnnnnnnnnnnnnnnnnnnnnnnnnnnnnnnnnnnnnnnnnnnnnnnnnnnnnnnnnnnnnnnnnnnnnnnnnnnnnnnnnnnnnnnnnnnnnnnnnnnnnnnnnnnnnnnnnnnnnnnnnnnnnnnnnnnnnnnnnnnnnnnnnnnnnnnnnnnnnnnnnnnnnnnnnnnnnnnnnnnnnnnnnnnnnnnnnnnnnnnnnnnnnnnnnnnnnnnnnnnnnnnnnnnnnnnnnnnnnnnnnnnnnnnnnnnnnnnnnnnnnnnnnnnnnnnnnnnnnnnnnnnnnnnnnnnnnnnnnnnnnnnnnnnnnnnnnnnnnnnnnnnnnnnnnnnnnnnnnnnnnnnnnnnnnnnnnnnnnnnnnnnnnnnnnnnnnnnnnnnnnnnnnnnnnnnnnnnnnnnnnnnnnnnnnnnnnnnnnnnnnnnnnnnnnnnnnnnnnnnnnnnnnnnnnnnnnnnnnnnnnnnnnnnnnnnnnnnnnnnnnnnnnnnnnnnnnnnnnnnnnnnnnnnnnnnnnnnnnnnnnnnnnnnnnnnnnnnnnnnnnnnnnnnnnnnnnnnnnnnnnnnnnnnnnnnnnnnnnnnnnnnnnnnnnnnnnnnnnnnnnnnnnnnnnnnnnnnnnnnnnnnnnnnnnnnnnnnnnnnnnnnnnnnnnnnnnnnnnnnnnnnnnnnnnnnnnnnnnnnnnnnnnnnnnnnnnnnnnnnnnnnnnnnnnnnnnnnnnnnnnnnnnnnnnnnnnnnnnnnnnnnnnnnnnnnnnnnnnnnnnnnnnnnnnnnnnnnnnnnnnnnnnnnnnnnnnnnnnnnnnnnnnnnnnnnnnnnnnnnnnnnnnnnnnnnnnnnnnnnnnnnnnnnnnnnnnnnnnnnnnnnnnnnnnnnnnnnnnnnnnnnnnnnnnnnnnnnnnnnnnnnnnnnnnnnnnnnnnnnnnnnnnnnnnnnnnnnnnnnnnnnnnnnnnnnnnnnnnnnnnnnnnnnnnnnnnnnnnnnnnnnnnnnnnnnnnnnnnnnnnnnnnnnnnnnnnnnnnnnnnnnnnnnnnnnnnnnnnnnnnnnnnnnnnnnnnnnnnnnnnnnnnnnnnnnnnnnnnnnnnnnnnnnnnnnnnnnnnnnnnnnnnnnnnnnnnnnnnnnnnnnnnnnnnnnnnnnnnnnnnnnnnnnnnnnnnnnnnnnnnnnnnnnnnnnnnnnnnnnnnnnnnnnnnnnnnnnnnnnnnnnnnnnnnnnnnnnnnnnnnnnnnnnnnnnnnnnnnnnnnnnnnnnnnnnnnnnnnnnnnnnnnnnnnnnnnnnnnnnnnnnnnnnnnnnnnnnnnnnnnnnnnnnnnnnnnnnnnnnnnnnnnnnnnnnnnnnnnnnnnnnnnnnnnnnnnnnnnnnnnnnnnnnnnnnnnnnnnnnnnnnnnnnnnnnnnnnnnnnnnnnnnnnnnnnnnnnnnnnnnnnnnnnnnnnnnnnnnnnnnnnnnnnnnnnnnnnnnnnnnnnnnnnnnnnnnnnnnnnnnnnnnnnnnnnnnnnnnnnnnnnnnnnnnnnnnnnnnnnnnnnnnnnnnnnnnnnnnnnnnnnnnnnnnnnnnnnnnnnnnnnnnnnnnnnnnnnnnnnnnnnnnnnnnnnnnnnnnnnnnnnnnnnnnnnnnnnnnnnnnnnnnnnnnnnnnnnnnnnnnnnnnnnnnnnnnnnnnnnnnnnnnnnnnnnnnnnnnnnnnnnnnnnnnnnnnnnnnnnnnnnnnnnnnnnnnnnnnnnnnnnnnnnnnnnnnnnnnnnnnnnnnnnnnnnnnnnnnnnnnnnnnnnnnnnnnnnnnnnnnnnnnnnnnnnnnnnnnnnnnnnnnnnnnnnnnnnnnnnnnnnnnnnnnnnnnnnnnnnnnnnnnnnnnnnnnnnnnnnnnnnnnnnnnnnnnnnnnnnnnnnnnnnnnnnnnnnnnnnnnnnnnnnnnnnnnnnnnnnnnnnnnnnnnnnnnnnnnnnnnnnnnnnnnnnnnnnnnnnnnnnnnnnnnnnnnnnnnnnnnnnnnnnnnnnnnnnnnnnnnnnnnnnnnnnnnnnnnnnnnnnnnnnnnnnnnnnnnnnnnnnnnnnnnnnnnnnnnnnnnnnnnnnnnnnnnnnnnnnnnnnnnnnnnnnnnnnnnnnnnnnnnnnnnnnnnnnnnnnnnnnnnnnnnnnnnnnnnnnnnnnnnnnnnnnnnnnnnnnnnnnnnnnnnnnnnnnnnnnnnnnnnnnnnnnnnnnnnnnnnnnnnnnnnnnnnnnnnnnnnnnnnnnnnnnnnnnnnnnnnnnnnnnnnnnnnnnnnnnnnnnnnnnnnnnnnnnnnnnnnnnnnnnnnnnnnnnnnnnnnnnnnnnnnnnnnnnnnnnnnnnnnnnnnnnnnnnnnnnnnnnnnnnnnnnnnnnnnnnnnnnnnnnnnnnnnnnnnnnnnnnnnnnnnnnnnnnnnnnnnnnnnnnnnnnnnnnnnnnnnnnnnnnnnnnnnnnnnnnnnnnnnnnnnnnnnnnnnnnnnnnnnnnnnnnnnnnnnnnnnnnnnnnnnnnnnnnnnnnnnnnnnnnnnnnnnnnnnnnnnnnnnnnnnnnnnnnnnnnnnnnnnnnnnnnnnnnnnnnnnnnnnnnnnnnnnnnnnnnnnnnnnnnnnnnnnnnnnnnnnnnnnnnnnnnnnnnnnnnnnnnnnnnnnnnnnnnnnnnnnnnnnnnnnnnnnnnnnnnnnnnnnnnnnnnnnnnnnnnnnnnnnnnnnnnnnnnnnnnnnnnnnnnnnnnnnnnnnnnnnnnnnnnnnnnnnnnnnnnnnnnnnnnnnnnnnnnnnnnnnnnnnnnnnnnnnnnnnnnnnnnnnnnnnnnnnnnnnnnnnnnnnnnnnnnnnnnnnnnnnnnnnnnnnnnnnnnnnnnnnnnnnnnnnnnnnnnnnnnnnnnnnnnnnnnnnnnnnnnnnnnnnnnnnnnnnnnnnnnnnnnnnnnnnnnnnnnnnnnnnnnnnnnnnnnnnnnnnnnnnnnnnnnnnnnnnnnnnnnnnnnnnnnnnnnnnnnnnnnnnnnnnnnnnnnnnnnnnnnnnnnnnnnnnnnnnnnnnnnnnnnnnnnnnnnnnnnnnnnnnnnnnnnnnnnnnnnnnnnnnnnnnnnnnnnnnnnnnnnnnnnnnnnnnnnnnnnnnnnnnnnnnnnnnnnnnnnnnnnnnnnnnnnnnnnnnnnnnnnnnnnnnnnnnnnnnnnnnnnnnnnnnnnnnnnnnnnnnnnnnnnnnnnnnnnnnnnnnnnnnnnnnnnnnnnnnnnnnnnnnnnnnnnnnnnnnnnnnnnnnnnnnnnnnnnnnnnnnnnnnnnnnnnnnnnnnnnnnnnnnnnnnnnnnnnnnnnnnnnnnnnnnnnnnnnnnnnnnnnnnnnnnnnnnnnnnnnnnnnnnnnnnnnnnnnnnnnnnnnnnnnnnnnnnnnnnnnnnnnnnnnnnnnnnnnnnnnnnnnnnnnnnnnnnnnnnnnnnnnnnnnnnnnnnnnnnnnnnnnnnnnnnnnnnnnnnnnnnnnnnnnnnnnnnnnnnnnnnnnnnnnnnnnnnnnnnnnnnnnnnnnnnnnnnnnnnnnnnnnnnnnnnnnnnnnnnnnnnnnnnnnnnnnnnnnnnnnnnnnnnnnnnnnnnnnnnnnnnnnnnnnnnnnnnnnnnnnnnnnnnnnnnnnnnnnnnnnnnnnnnnnnnnnnnnnnnnnnnnnnnnnnnnnnnnnnnnnnnnnnnnnnnnnnnnnnnnnnnnnnnnnnnnnnnnnnnnnnnnnnnnnnnnnnnnnnnnnnnnnnnnnnnnnnnnnnnnnnnnnnnnnnnnnnnnnnnnnnnnnnnnnnnnnnnnnnnnnnnnnnnnnnnnnnnnnnnnnnnnnnnnnnnnnnnnnnnnnnnnnnnnnnnnnnnnnnnnnnnnnnnnnnnnnnnnnnnnnnnnnnnnnnnnnnnnnnnnnnnnnnnnnnnnnnnnnnnnnnnnnnnnnnnnnnnnnnnnnnnnnnnnnnnnnnnnnnnnnnnnnnnnnnnnnnnnnnnnnnnnnnnnnnnnnnnnnnnnnnnnnnnnnnnnnnnnnnnnnnnnnnnnnnnnnnnnnnnnnnnnnnnnnnnnnnnnnnnnnnnnnnnnnnnnnnnnnnnnnnnnnnnnnnnnnnnnnnnnnnnnnnnnnnnnnnnnnnnnnnnnnnnnnnnnnnnnnnnnnnnnnnnnnnnnnnnnnnnnnnnnnnnnnnnnnnnnnnnnnnnnnnnnnnnnnnnnnnnnnnnnnnnnnnnnnnnnnnnnnnnnnnnnnnnnnnnnnnnnnnnnnnnnnnnnnnnnnnnnnnnnnnnnnnnnnnnnnnnnnnnnnnnnnnnnnnnnnnnnnnnnnnnnnnnnnnnnnnnnnnnnnnnnnnnnnnnnnnnnnnnnnnnnnnnnnnnnnnnnnnnnnnnnnnnnnnnnnnnnnnnnnnnnnnnnnnnnnnnnnnnnnnnnnnnnnnnnnnnnnnnnnnnnnnnnnnnnnnnnnnnnnnnnnnnnnnnnnnnnnnnnnnnnnnnnnnnnnnnnnnnnnnnnnnnnnnnnnnnnnnnnnnnnnnnnnnnnnnnnnnnnnnnnnnnnnnnnnnnnnnnnnnnnnnnnnnnnnnnnnnnnnnnnnnnnnnnnnnnnnnnnnnnnnnnnnnnnnnnnnnnnnnnnnnnnnnnnnnnnnnnnnnnnnnnnnnnnnnnnnnnnnnnnnnnnnnnnnnnnnnnnnnnnnnnnnnnnnnnnnnnnnnnnnnnnnnnnnnnnnnnnnnnnnnnnnnnnnnnnnnnnnnnnnnnnnnnnnnnnnnnnnnnnnnnnnnnnnnnnnnnnnnnnnnnnnnnnnnnnnnnnnnnnnnnnnnnnnnnnnnnnnnnnnnnnnnnnnnnnnnnnnnnnnnnnnnnnnnnnnnnnnnnnnnnnnnnnnnnnnnnnnnnnnnnnnnnnnnnnnnnnnnnnnnnnnnnnnnnnnnnnnnnnnnnnnnnnnnnnnnnnnnnnnnnnnnnnnnnnnnnnnnnnnnnnnnnnnnnnnnnnnnnnnnnnnnnnnnnnnnnnnnnnnnnnnnnnnnnnnnnnnnnnnnnnnnnnnnnnnnnnnnnnnnnnnnnnnnnnnnnnnnnnnnnnnnnnnnnnnnnnnnnnnnnnnnnnnnnnnnnnnnnnnnnnnnnnnnnnnnnnnnnnnnnnnnnnnnnnnnnnnnnnnnnnnnnnnnnnnnnnnnnnnnnnnnnnnnnnnnnnnnnnnnnnnnnnnnnnnnnnnnnnnnnnnnnnnnnnnnnnnnnnnnnnnnnnnnnnnnnnnnnnnnnnnnnnnnnnnnnnnnnnnnnnnnnnnnnnnnnnnnnnnnnnnnnnnnnnnnnnnnnnnnnnnnnnnnnnnnnnnnnnnnnnnnnnnnnnnnnnnnnnnnnnnnnnnnnnnnnnnnnnnnnnnnnnnnnnnnnnnnnnnnnnnnnnnnnnnnnnnnnnnnnnnnnnnnnnnnnnnnnnnnnnnnnnnnnnnnnnnnnnnnnnnnnnnnnnnnnnnnnnnnnnnnnnnnnnnnnnnnnnnnnnnnnnnnnnnnnnnnnnnnnnnnnnnnnnnnnnnnnnnnnnnnnnnnnnnnnnnnnnnnnnnnnnnnnnnnnnnnnnnnnnnnnnnnnnnnnnnnnnnnnnnnnnnnnnnnnnnnnnnnnnnnnnnnnnnnnnnnnnnnnnnnnnnnnnnnnnnnnnnnnnnnnnnnnnnnnnnnnnnnnnnnnnnnnnnnnnnnnnnnnnnnnnnnnnnnnnnnnnnnnnnnnnnnnnnnnnnnnnnnnnnnnnnnnnnnnnnnnnnnnnnnnnnnnnnnnnnnnnnnnnnnnnnnnnnnnnnnnnnnnnnnnnnnnnnnnnnnnnnnnnnnnnnnnnnnnnnnnnnnnnnnnnnnnnnnnnnnnnnnnnnnnnnnnnnnnnnnnnnnnnnnnnnnnnnnnnnnnnnnnnnnnnnnnnnnnnnnnnnnnnnnnnnnnnnnnnnnnnnnnnnnnnnnnnnnnnnnnnnnnnnnnnnnnnnnnnnnnnnnnnnnnnnnnnnnnnnnnnnnnnnnnnnnnnnnnnnnnnnnnnnnnnnnnnnnnnnnnnnnnnnnnnnnnnnnnnnnnnnnnnnnnnnnnnnnnnnnnnnnnnnnnnnnnnnnnnnnnnnnnnnnnnnnnnnnnnnnnnnnnnnnnnnnnnnnnnnnnnnnnnnnnnnnnnnnnnnnnnnnnnnnnnnnnnnnnnnnnnnnnnnnnnnnnnnnnnnnnnnnnnnnnnnnnnnnnnnnnnnnnnnnnnnnnnnnnnnnnnnnnnnnnnnnnnnnnnnnnnnnnnnnnnnnnnnnnnnnnnnnnnnnnnnnnnnnnnnnnnnnnnnnnnnnnnnnnnnnnnnnnnnnnnnnnnnnnnnnnnnnnnnnnnnnnnnnnnnnnnnnnnnnnnnnnnnnnnnnnnnnnnnnnnnnnnnnnnnnnnnnnnnnnnnnnnnnnnnnnnnnnnnnnnnnnnnnnnnnnnnnnnnnnnnnnnnnnnnnnnnnnnnnnnnnnnnnnnnnnnnnnnnnnnnnnnnnnnnnnnnnnnnnnnnnnnnnnnnnnnnnnnnnnnnnnnnnnnnnnnnnnnnnnnnnnnnnnnnnnnnnnnnnnnnnnnnnnnnnnnnnnnnnnnnnnnnnnnnnnnnnnnnnnnnnnnnnnnnnnnnnnnnnnnnnnnnnnnnnnnnnnnnnnnnnnnnnnnnnnnnnnnnnnnnnnnnnnnnnnnnnnnnnnnnnnnnnnnnnnnnnnnnnnnnnnnnnnnnnnnnnnnnnnnnnnnnnnnnnnnnnnnnnnnnnnnnnnnnnnnnnnnnnnnnnnnnnnnnnnnnnnnnnnnnnnnnnnnnnnnnnnnnnnnnnnnnnnnnnnnnnnnnnnnnnnnnnnnnnnnnnnnnnnnnnnnnnnnnnnnnnnnnnnnnnnnnnnnnnnnnnnnnnnnnnnnnnnnnnnnnnnnnnnnnnnnnnnnnnnnnnnnnnnnnnnnnnnnnnnnnnnnnnnnnnnnnnnnnnnnnnnnnnnnnnnnnnnnnnnnnnnnnnnnnnnnnnnnnnnnnnnnnnnnnnnnnnnnnnnnnnnnnnnnnnnnnnnnnnnnnnnnnnnnnnnnnnnnnnnnnnnnnnnnnnnnnnnnnnnnnnnnnnnnnnnnnnnnnnnnnnnnnnnnnnnnnnnnnnnnnnnnnnnnnnnnnnnnnnnnnnnnnnnnnnnnnnnnnnnnnnnnnnnnnnnnnnnnnnnnnnnnnnnnnnnnnnnnnnnnnnnnnnnnnnnnnnnnnnnnnnnnnnnnnnnnnnnnnnnnnnnnnnnnnnnnnnnnnnnnnnnnnnnnnnnnnnnnnnnnnnnnnnnnnnnnnnnnnnnnnnnnnnnnnnnnnnnnnnnnnnnnnnnnnnnnnnnnnnnnnnnnnnnnnnnnnnnnnnnnnnnnnnnnnnnnnnnnnnnnnnnnnnnnnnnnnnnnnnnnnnnnnnnnnnnnnnnnnnnnnnnnnnnnnnnnnnnnnnnnnnnnnnnnnnnnnnnnnnnnnnnnnnnnnnnnnnnnnnnnnnnnnnnnnnnnnnnnnnnnnnnnnnnnnnnnnnnnnnnnnnnnnnnnnnnnnnnnnnnnnnnnnnnnnnnnnnnnnnnnnnnnnnnnnnnnnnnnnnnnnnnnnnnnnnnnnnnnnnnnnnnnnnnnnnnnnnnnnnnnnnnnnnnnnnnnnnnnnnnnnnnnnnnnnnnnnnnnnnnnnnnnnnnnnnnnnnnnnnnnnnnnnnnnnnnnnnnnnnnnnnnnnnnnnnnnnnnnnnnnnnnnnnnnnnnnnnnnnnnnnnnnnnnnnnnnnnnnnnnnnnnnnnnnnnnnnnnnnnnnnnnnnnnnnnnnnnnnnnnnnnnnnnnnnnnnnnnnnnnnnnnnnnnnnnnnnnnnnnnnnnnnnnnnnnnnnnnnnnnnnnnnnnnnnnnnnnnnnnnnnnnnnnnnnnnnnnnnnnnnnnnnnnnnnnnnnnnnnnnnnnnnnnnnnnnnnnnnnnnnnnnnnnnnnnnnnnnnnnnnnnnnnnnnnnnnnnnnnnnnnnnnnnnnnnnnnnnnnnnnnnnnnnnnnnnnnnnnnnnnnnnnnnnnnnnnnnnnnnnnnnnnnnnnnnnnnnnnnnnnnnnnnnnnnnnnnnnnnnnnnnnnnnnnnnnnnnnnnnnnnnnnnnnnnnnnnnnnnnnnnnnnnnnnnnnnnnnnnnnnnnnnnnnnnnnnnnnnnnnnnnnnnnnnnnnnnnnnnnnnnnnnnnnnnnnnnnnnnnnnnnnnnnnnnnnnnnnnnnnnnnnnnnnnnnnnnnnnnnnnnnnnnnnnnnnnnnnnnnnnnnnnnnnnnnnnnnnnnnnnnnnnnnnnnnnnnnnnnnnnnnnnnnnnnnnnnnnnnnnnnnnnnnnnnnnnnnnnnnnnnnnnnnnnnnnnnnnnnnnnnnnnnnnnnnnnnnnnnnnnnnnnnnnnnnnnnnnnnnnnnnnnnnnnnnnnnnnnnnnnnnnnnnnnnnnnnnnnnnnnnnnnnnnnnnnnnnnnnnnnnnnnnnnnnnnnnnnnnnnnnnnnnnnnnnnnnnnnnnnnnnnnnnnnnnnnnnnnnnnnnnnnnnnnnnnnnnnnnnnnnnnnnnnnnnnnnnnnnnnnnnnnnnnnnnnnnnnnnnnnnnnnnnnnnnnnnnnnnnnnnnnnnnnnnnnnnnnnnnnnnnnnnnnnnnnnnnnnnnnnnnnnnnnnnnnnnnnnnnnnnnnnnnnnnnnnnnnnnnnnnnnnnnnnnnnnnnnnnnnnnnnnnnnnnnnnnnnnnnnnnnnnnnnnnnnnnnnnnnnnnnnnnnnnnnnnnnnnnnnnnnnnnnnnnnnnnnnnnnnnnnnnnnnnnnnnnnnnnnnnnnnnnnnnnnnnnnnnnnnnnnnnnnnnnnnnnnnnnnnnnnnnnnnnnnnnnnnnnnnnnnnnnnnnnnnnnnnnnnnnnnnnnnnnnnnnnnnnnnnnnnnnnnnnnnnnnnnnnnnnnnnnnnnnnnnnnnnnnnnnnnnnnnnnnnnnnnnnnnnnnnnnnnnnnnnnnnnnnnnnnnnnnnnnnnnnnnnnnnnnnnnnnnnnnnnnnnnnnnnnnnnnnnnnnnnnnnnnnnnnnnnnnnnnnnnnnnnnnnnnnnnnnnnnnnnnnnnnnnnnnnnnnnnnnnnnnnnnnnnnnnnnnnnnnnnnnnnnnnnnnnnnnnnnnnnnnnnnnnnnnnnnnnnnnnnnnnnnnnnnnnnnnnnnnnnnnnnnnnnnnnnnnnnnnnnnnnnnnnnnnnnnnnnnnnnnnnnnnnnnnnnnnnnnnnnnnnnnnnnnnnnnnnnnnnnnnnnnnnnnnnnnnnnnnnnnnnnnnnnnnnnnnnnnnnnnnnnnnnnnnnnnnnnnnnnnnnnnnnnnnnnnnnnnnnnnnnnnnnnnnnnnnnnnnnnnnnnnnnnnnnnnnnnnnnnnnnnnnnnnnnnnnnnnnnnnnnnnnnnnnnnnnnnnnnnnnnnnnnnnnnnnnnnnnnnnnnnnnnnnnnnnnnnnnnnnnnnnnnnnnnnnnnnnnnnnnnnnnnnnnnnnnnnnnnnnnnnnnnnnnnnnnnnnnnnnnnnnnnnnnnnnnnnnnnnnnnnnnnnnnnnnnnnnnnnnnnnnnnnnnnnnnnnnnnnnnnnnnnnnnnnnnnnnnnnnnnnnnnnnnnnnnnnnnnnnnnnnnnnnnnnnnnnnnnnnnnnnnnnnnnnnnnnnnnnnnnnnnnnnnnnnnnnnnnnnnnnnnnnnnnnnnnnnnnnnnnnnnnnnnnnnnnnnnnnnnnnnnnnnnnnnnnnnnnnnnnnnnnnnnnnnnnnnnnnnnnnnnnnnnnnnnnnnnnnnnnnnnnnnnnnnnnnnnnnnnnnnnnnnnnnnnnnnnnnnnnnnnnnnnnnnnnnnnnnnnnnnnnnnnnnnnnnnnnnnnnnnnnnnnnnnnnnnnnnnnnnnnnnnnnnnnnnnnnnnnnnnnnnnnnnnnnnnnnnnnnnnnnnnnnnnnnnnnnnnnnnnnnnnnnnnnnnnnnnnnnnnnnnnnnnnnnnnnnnnnnnnnnnnnnnnnnnnnnnnnnnnnnnnnnnnnnnnnnnnnnnnnnnnnnnnnnnnnnnnnnnnnnnnnnnnnnnnnnnnnnnnnnnnnnnnnnnnnnnnnnnnnnnnnnnnnnnnnnnnnnnnnnnnnnnnnnnnnnnnnnnnnnnnnnnnnnnnnnnnnnnnnnnnnnnnnnnnnnnnnnnnnnnnnnnnnnnnnnnnnnnnnnnnnnnnnnnnnnnnnnnnnnnnnnnnnnnnnnnnnnnnnnnnnnnnnnnnnnnnnnnnnnnnnnnnnnnnnnnnnnnnnnnnnnnnnnnnnnnnnnnnnnnnnnnnnnnnnnnnnnnnnnnnnnnnnnnnnnnnnnnnnnnnnnnnnnnnnnnnnnnnnnnnnnnnnnnnnnnnnnnnnnnnnnnnnnnnnnnnnnnnnnnnnnnnnnnnnnnnnnnnnnnnnnnnnnnnnnnnnnnnnnnnnnnnnnnnnnnnnnnnnnnnnnnnnnnnnnnnnnnnnnnnnnnnnnnnnnnnnnnnnnnnnnnnnnnnnnnnnnnnnnnnnnnnnnnnnnnnnnnnnnnnnnnnnnnnnnnnnnnnnnnnnnnnnnnnnnnnnnnnnnnnnnnnnnnnnnnnnnnnnnnnnnnnnnnnnnnnnnnnnnnnnnnnnnnnnnnnnnnnnnnnnnnnnnnnnnnnnnnnnnnnnnnnnnnnnnnnnnnnnnnnnnnnnnnnnnnnnnnnnnnnnnnnnnnnnnnnnnnnnnnnnnnnnnnnnnnnnnnnnnnnnnnnnnnnnnnnnnnnnnnnnnnnnnnnnnnnnnnnnnnnnnnnnnnnnnnnnnnnnnnnnnnnnnnnnnnnnnnnnnnnnnnnnnnnnnnnnnnnnnnnnnnnnnnnnnnnnnnnnnnnnnnnnnnnnnnnnnnnnnnnnnnnnnnnnnnnnnnnnnnnnnnnnnnnnnnnnnnnnnnnnnnnnnnnnnnnnnnnnnnnnnnnnnnnnnnnnnnnnnnnnnnnnnnnnnnnnnnnnnnnnnnnnnnnnnnnnnnnnnnnnnnnnnnnnnnnnnnnnnnnnnnnnnnnnnnnnnnnnnnnnnnnnnnnnnnnnnnnnnnnnnnnnnnnnnnnnnnnnnnnnnnnnnnnnnnnnnnnnnnnnnnnnnnnnnnnnnnnnnnnnnnnnnnnnnnnnnnnnnnnnnnnnnnnnnnnnnnnnnnnnnnnnnnnnnnnnnnnnnnnnnnnnnnnnnnnnnnnnnnnnnnnnnnnnnnnnnnnnnnnnnnnnnnnnnnnnnnnnnnnnnnnnnnnnnnnnnnnnnnnnnnnnnnnnnnnnnnnnnnnnnnnnnnnnnnnnnnnnnnnnnnnnnnnnnnnnnnnnnnnnnnnnnnnnnnnnnnnnnnnnnnnnnnnnnnnnnnnnnnnnnnnnnnnnnnnnnnnnnnnnnnnnnnnnnnnnnnnnnnnnnnnnnnnnnnnnnnnnnnnnnnnnnnnnnnnnnnnnnnnnnnnnnnnnnnnnnnnnnnnnnnnnnnnnnnnnnnnnnnnnnnnnnnnnnnnnnnnnnnnnnnnnnnnnnnnnnnnnnnnnnnnnnnnnnnnnnnnnnnnnnnnnnnnnnnnnnnnnnnnnnnnnnnnnnnnnnnnnnnnnnnnnnnnnnnnnnnnnnnnnnnnnnnnnnnnnnnnnnnnnnnnnnnnnnnnnnnnnnnnnnnnnnnnnnnnnnnnnnnnnnnnnnnnnnnnnnnnnnnnnnnnnnnnnnnnnnnnnnnnnnnnnnnnnnnnnnnnnnnnnnnnnnnnnnnnnnnnnnnnnnnnnnnnnnnnnnnnnnnnnnnnnnnnnnnnnnnnnnnnnnnnnnnnnnnnnnnnnnnnnnnnnnnnnnnnnnnnnnnnnnnnnnnnnnnnnnnnnnnnnnnnnnnnnnnnnnnnnnnnnnnnnnnnnnnnnnnnnnnnnnnnnnnnnnnnnnnnnnnnnnnnnnnnnnnnnnnnnnnnnnnnnnnnnnnnnnnnnnnnnnnnnnnnnnnnnnnnnnnnnnnnnnnnnnnnnnnnnnnnnnnnnnnnnnnnnnnnnnnnnnnnnnnnnnnnnnnnnnnnnnnnnnnnnnnnnnnnnnnnnnnnnnnnnnnnnnnnnnnnnnnnnnnnnnnnnnnnnnnnnnnnnnnnnnnnnnnnnnnnnnnnnnnnnnnnnnnnnnnnnnnnnnnnnnnnnnnnnnnnnnnnnnnnnnnnnnnnnnnnnnnnnnnnnnnnnnnnnnnnnnnnnnnnnnnnnnnnnnnnnnnnnnnnnnnnnnnnnnnnnnnnnnnnnnnnnnnnnnnnnnnnnnnnnnnnnnnnnnnnnnnnnnnnnnnnnnnnnnnnnnnnnnnnnnnnnnnnnnnnnnnnnnnnnnnnnnnnnnnnnnnnnnnnnnnnnnnnnnnnnnnnnnnnnnnnnnnnnnnnnnnnnnnnnnnnnnnnnnnnnnnnnnnnnnnnnnnnnnnnnnnnnnnnnnnnnnnnnnnnnnnnnnnnnnnnnnnnnnnnnnnnnnnnnnnnnnnnnnnnnnnnnnnnnnnnnnnnnnnnnnnnnnnnnnnnnnnnnnnnnnnnnnnnnnnnnnnnnnnnnnnnnnnnnnnnnnnnnnnnnnnnnnnnnnnnnnnnnnnnnnnnnnnnnnnnnnnnnnnnnnnnnnnnnnnnnnnnnnnnnnnnnnnnnnnnnnnnnnnnnnnnnnnnnnnnnnnnnnnnnnnnnnnnnnnnnnnnnnnnnnnnnnnnnnnnnnnnnnnnnnnnnnnnnnnnnnnnnnnnnnnnnnnnnnnnnnnnnnnnnnnnnnnnnnnnnnnnnnnnnnnnnnnnnnnnnnnnnnnnnnnnnnnnnnnnnnnnnnnnnnnnnnnnnnnnnnnnnnnnnnnnnnnnnnnnnnnnnnnnnnnnnnnnnnnnnnnnnnnnnnnnnnnnnnnnnnnnnnnnnnnnnnnnnnnnnnnnnnnnnnnnnnnnnnnnnnnnnnnnnnnnnnnnnnnnnnnnnnnnnnnnnnnnnnnnnnnnnnnnnnnnnnnnnnnnnnnnnnnnnnnnnnnnnnnnnnnnnnnnnnnnnnnnnnnnnnnnnnnnnnnnnnnnnnnnnnnnnnnnnnnnnnnnnnnnnnnnnnnnnnnnnnnnnnnnnnnnnnnnnnnnnnnnnnnnnnnnnnnnnnnnnnnnnnnnnnnnnnnnnnnnnnnnnnnnnnnnnnnnnnnnnnnnnnnnnnnnnnnnnnnnnnnnnnnnnnnnnnnnnnnnnnnnnnnnnnnnnnnnnnnnnnnnnnnnnnnnnnnnnnnnnnnnnnnnnnnnnnnnnnnnnnnnnnnnnnnnnnnnnnnnnnnnnnnnnnnnnnnnnnnnnnnnnnnnnnnnnnnnnnnnnnnnnnnnnnnnnnnnnnnnnnnnnnnnnnnnnnnnnnnnnnnnnnnnnnnnnnnnnnnnnnnnnnnnnnnnnnnnnnnnnnnnnnnnnnnnnnnnnnnnnnnnnnnnnnnnnnnnnnnnnnnnnnnnnnnnnnnnnnnnnnnnnnnnnnnnnnnnnnnnnnnnnnnnnnnnnnnnnnnnnnnnnnnnnnnnnnnnnnnnnnnnnnnnnnnnnnnnnnnnnnnnnnnnnnnnnnnnnnnnnnnnnnnnnnnnnnnnnnnnnnnnnnnnnnnnnnnnnnnnnnnnnnnnnnnnnnnnnnnnnnnnnnnnnnnnnnnnnnnnnnnnnnnnnnnnnnnnnnnnnnnnnnnnnnnnnnnnnnnnnnnnnnnnnnnnnnnnnnnnnnnnnnnnnnnnnnnnnnnnnnnnnnnnnnnnnnnnnnnnnnnnnnnnnnnnnnnnnnnnnnnnnnnnnnnnnnnnnnnnnnnnnnnnnnnnnnnnnnnnnnnnnnnnnnnnnnnnnnnnnnnnnnnnnnnnnnnnnnnnnnnnnnnnnnnnnnnnnnnnnnnnnnnnnnnnnnnnnnnnnnnnnnnnnnnnnnnnnnnnnnnnnnnnnnnnnnnnnnnnnnnnnnnnnnnnnnnnnnnnnnnnnnnnnnnnnnnnnnnnnnnnnnnnnnnnnnnnnnnnnnnnnnnnnnnnnnnnnnnnnnnnnnnnnnnnnnnnnnnnnnnnnnnnnnnnnnnnnnnnnnnnnnnnnnnnnnnnnnnnnnnnnnnnnnnnnnnnnnnnnnnnnnnnnnnnnnnnnnnnnnnnnnnnnnnnnnnnnnnnnnnnnnnnnnnnnnnnnnnnnnnnnnnnnnnnnnnnnnnnnnnnnnnnnnnnnnnnnnnnnnnnnnnnnnnnnnnnnnnnnnnnnnnnnnnnnnnnnnnnnnnnnnnnnnnnnnnnnnnnnnnnnnnnnnnnnnnnnnnnnnnnnnnnnnnnnnnnnnnnnnnnnnnnnnnnnnnnnnnnnnnnnnnnnnnnnnnnnnnnnnnnnnnnnnnnnnnnnnnnnnnnnnnnnnnnnnnnnnnnnnnnnnnnnnnnnnnnnnnnnnnnnnnnnnnnnnnnnnnnnnnnnnnnnnnnnnnnnnnnnnnnnnnnnnnnnnnnnnnnnnnnnnnnnnnnnnnnnnnnnnnnnnnnnnnnnnnnnnnnnnnnnnnnnnnnnnnnnnnnnnnnnnnnnnnnnnnnnnnnnnnnnnnnnnnnnnnnnnnnnnnnnnnnnnnnnnnnnnnnnnnnnnnnnnnnnnnnnnnnnnnnnnnnnnnnnnnnnnnnnnnnnnnnnnnnnnnnnnnnnnnnnnnnnnnnnnnnnnnnnnnnnnnnnnnnnnnnnnnnnnnnnnnnnnnnnnnnnnnnnnnnnnnnnnnnnnnnnnnnnnnnnnnnnnnnnnnnnnnnnnnnnnnnnnnnnnnnnnnnnnnnnnnnnnnnnnnnnnnnnnnnnnnnnnnnnnnnnnnnnnnnnnnnnnnnnnnnnnnnnnnnnnnnnnnnnnnnnnnnnnnnnnnnnnnnnnnnnnnnnnnnnnnnnnnnnnnnnnnnnnnnnnnnnnnnnnnnnnnnnnnnnnnnnnnnnnnnnnnnnnnnnnnnnnnnnnnnnnnnnnnnnnnnnnnnnnnnnnnnnnnnnnnnnnnnnnnnnnnnnnnnnnnnnnnnnnnnnnnnnnnnnnnnnnnnnnnnnnnnnnnnnnnnnnnnnnnnnnnnnnnnnnnnnnnnnnnnnnnnnnnnnnnnnnnnnnnnnnnnnnnnnnnnnnnnnnnnnnnnnnnnnnnnnnnnnnnnnnnnnnnnnnnnnnnnnnnnnnnnnnnnnnnnnnnnnnnnnnnnnnnnnnnnnnnnnnnnnnnnnnnnnnnnnnnnnnnnnnnnnnnnnnnnnnnnnnnnnnnnnnnnnnnnnnnnnnnnnnnnnnnnnnnnnnnnnnnnnnnnnnnnnnnnnnnnnnnnnnnnnnnnnnnnnnnnnnnnnnnnnnnnnnnnnnnnnnnnnnnnnnnnnnnnnnnnnnnnnnnnnnnnnnnnnnnnnnnnnnnnnnnnnnnnnnnnnnnnnnnnnnnnnnnnnnnnnnnnnnnnnnnnnnnnnnnnnnnnnnnnnnnnnnnnnnnnnnnnnnnnnnnnnnnnnnnnnnnnnnnnnnnnnnnnnnnnnnnnnnnnnnnnnnnnnnnnnnnnnnnnnnnnnnnnnnnnnnnnnnnnnnnnnnnnnnnnnnnnnnnnnnnnnnnnnnnnnnnnnnnnnnnnnnnnnnnnnnnnnnnnnnnnnnnnnnnnnnnnnnnnnnnnnnnnnnnnnnnnnnnnnnnnnnnnnnnnnnnnnnnnnnnnnnnnnnnnnnnnnnnnnnnnnnnnnnnnnnnnnnnnnnnnnnnnnnnnnnnnnnnnnnnnnnnnnnnnnnnnnnnnnnnnnnnnnnnnnnnnnnnnnnnnnnnnnnnnnnnnnnnnnnnnnnnnnnnnnnnnnnnnnnnnnnnnnnnnnnnnnnnnnnnnnnnnnnnnnnnnnnnnnnnnnnnnnnnnnnnnnnnnnnnnnnnnnnnnnnnnnnnnnnnnnnnnnnnnnnnnnnnnnnnnnnnnnnnnnnnnnnnnnnnnnnnnnnnnnnnnnnnnnnnnnnnnnnnnnnnnnnnnnnnnnnnnnnnnnnnnnnnnnnnnnnnnnnnnnnnnnnnnnnnnnnnnnnnnnnnnnnnnnnnnnnnnnnnnnnnnnnnnnnnnnnnnnnnnnnnnnnnnnnnnnnnnnnnnnnnnnnnnnnnnnnnnnnnnnnnnnnnnnnnnnnnnnnnnnnnnnnnnnnnnnnnnnnnnnnnnnnnnnnnnnnnnnnnnnnnnnnnnnnnnnnnnnnnnnnnnnnnnnnnnnnnnnnnnnnnnnnnnnnnnnnnnnnnnnnnnnnnnnnnnnnnnnnnnnnnnnnnnnnnnnnnnnnnnnnnnnnnnnnnnnnnnnnnnnnnnnnnnnnnnnnnnnnnnnnnnnnnnnnnnnnnnnnnnnnnnnnnnnnnnnnnnnnnnnnnnnnnnnnnnnnnnnnnnnnnnnnnnnnnnnnnnnnnnnnnnnnnnnnnnnnnnnnnnnnnnnnnnnnnnnnnnnnnnnnnnnnnnnnnnnnnnnnnnnnnnnnnnnnnnnnnnnnnnnnnnnnnnnnnnnnnnnnnnnnnnnnnnnnnnnnnnnnnnnnnnnnnnnnnnnnnnnnnnnnnnnnnnnnnnnnnnnnnnnnnnnnnnnnnnnnnnnnnnnnnnnnnnnnnnnnnnnnnnnnnnnnnnnnnnnnnnnnnnnnnnnnnnnnnnnnnnnnnnnnnnnnnnnnnnnnnnnnnnnnnnnnnnnnnnnnnnnnnnnnnnnnnnnnnnnnnnnnnnnnnnnnnnnnnnnnnnnnnnnnnnnnnnnnnnnnnnnnnnnnnnnnnnnnnnnnnnnnnnnnnnnnnnnnnnnnnnnnnnnnnnnnnnnnnnnnnnnnnnnnnnnnnnnnnnnnnnnnnnnnnnnnnnnnnnnnnnnnnnnnnnnnnnnnnnnnnnnnnnnnnnnnnnnnnnnnnnnnnnnnnnnnnnnnnnnnnnnnnnnnnnnnnnnnnnnnnnnnnnnnnnnnnnnnnnnnnnnnnnnnnnnnnnnnnnnnnnnnnnnnnnnnnnnnnnnnnnnnnnnnnnnnnnnnnnnnnnnnnnnnnnnnnnnnnnnnnnnnnnnnnnnnnnnnnnnnnnnnnnnnnnnnnnnnnnnnnnnnnnnnnnnnnnnnnnnnnnnnnnnnnnnnnnnnnnnnnnnnnnnnnnnnnnnnnnnnnnnnnnnnnnnnnnnnnnnnnnnnnnnnnnnnnnnnnnnnnnnnnnnnnnnnnnnnnnnnnnnnnnnnnnnnnnnnnnnnnnnnnnnnnnnnnnnnnnnnnnnnnnnnnnnnnnnnnnnnnnnnnnnnnnnnnnnnnnnnnnnnnnnnnnnnnnnnnnnnnnnnnnnnnnnnnnnnnnnnnnnnnnnnnnnnnnnnnnnnnnnnnnnnnnnnnnnnnnnnnnnnnnnnnnnnnnnnnnnnnnnnnnnnnnnnnnnnnnnnnnnnnnnnnnnnnnnnnnnnnnnnnnnnnnnnnnnnnnnnnnnnnnnnnnnnnnnnnnnnnnnnnnnnnnnnnnnnnnnnnnnnnnnnnnnnnnnnnnnnnnnnnnnnnnnnnnnnnnnnnnnnnnnnnnnnnnnnnnnnnnnnnnnnnnnnnnnnnnnnnnnnnnnnnnnnnnnnnnnnnnnnnnnnnnnnnnnnnnnnnnnnnnnnnnnnnnnnnnnnnnnnnnnnnnnnnnnnnnnnnnnnnnnnnnnnnnnnnnnnnnnnnnnnnnnnnnnnnnnnnnnnnnnnnnnnnnnnnnnnnnnnnnnnnnnnnnnnnnnnnnnnnnnnnnnnnnnnnnnnnnnnnnnnnnnnnnnnnnnnnnnnnnnnnnnnnnnnnnnnnnnnnnnnnnnnnnnnnnnnnnnnnnnnnnnnnnnnnnnnnnnnnnnnnnnnnnnnnnnnnnnnnnnnnnnnnnnnnnnnnnnnnnnnnnnnnnnnnnnnnnnnnnnnnnnnnnnnnnnnnnnnnnnnnnnnnnnnnnnnnnnnnnnnnnnnnnnnnnnnnnnnnnnnnnnnnnnnnnnnnnnnnnnnnnnnnnnnnnnnnnnnnnnnnnnnnnnnnnnnnnnnnnnnnnnnnnnnnnnnnnnnnnnnnnnnnnnnnnnnnnnnnnnnnnnnnnnnnnnnnnnnnnnnnnnnnnnnnnnnnnnnnnnnnnnnnnnnnnnnnnnnnnnnnnnnnnnnnnnnnnnnnnnnnnnnnnnnnnnnnnnnnnnnnnnnnnnnnnnnnnnnnnnnnnnnnnnnnnnnnnnnnnnnnnnnnnnnnnnnnnnnnnnnnnnnnnnnnnnnnnnnnnnnnnnnnnnnnnnnnnnnnnnnnnnnnnnnnnnnnnnnnnnnnnnnnnnnnnnnnnnnnnnnnnnnnnnnnnnnnnnnnnnnnnnnnnnnnnnnnnnnnnnnnnnnnnnnnnnnnnnnnnnnnnnnnnnnnnnnnnnnnnnnnnnnnnnnnnnnnnnnnnnnnnnnnnnnnnnnnnnnnnnnnnnnnnnnnnnnnnnnnnnnnnnnnnnnnnnnnnnnnnnnnnnnnnnnnnnnnnnnnnnnnnnnnnnnnnnnnnnnnnnnnnnnnnnnnnnnnnnnnnnnnnnnnnnnnnnnnnnnnnnnnnnnnnnnnnnnnnnnnnnnnnnnnnnnnnnnnnnnnnnnnnnnnnnnnnnnnnnnnnnnnnnnnnnnnnnnnnnnnnnnnnnnnnnnnnnnnnnnnnnnnnnnnnnnnnnnnnnnnnnnnnnnnnnnnnnnnnnnnnnnnnnnnnnnnnnnnnnnnnnnnnnnnnnnnnnnnnnnnnnnnnnnnnnnnnnnnnnnnnnnnnnnnnnnnnnnnnnnnnnnnnnnnnnnnnnnnnnnnnnnnnnnnnnnnnnnnnnnnnnnnnnnnnnnnnnnnnnnnnnnnnnnnnnnnnnnnnnnnnnnnnnnnnnnnnnnnnnnnnnnnnnnnnnnnnnnnnnnnnnnnnnnnnnnnnnnnnnnnnnnnnnnnnnnnnnnnnnnnnnnnnnnnnnnnnnnnnnnnnnnnnnnnnnnnnnnnnnnnnnnnnnnnnnnnnnnnnnnnnnnnnnnnnnnnnnnnnnnnnnnnnnnnnnnnnnnnnnnnnnnnnnnnnnnnnnnnnnnnnnnnnnnnnnnnnnnnnnnnnnnnnnnnnnnnnnnnnnnnnnnnnnnnnnnnnnnnnnnnnnnnnnnnnnnnnnnnnnnnnnnnnnnnnnnnnnnnnnnnnnnnnnnnnnnnnnnnnnnnnnnnnnnnnnnnnnnnnnnnnnnnnnnnnnnnnnnnnnnnnnnnnnnnnnnnnnnnnnnnnnnnnnnnnnnnnnnnnnnnnnnnnnnnnnnnnnnnnnnnnnnnnnnnnnnnnnnnnnnnnnnnnnnnnnnnnnnnnnnnnnnnnnnnnnnnnnnnnnnnnnnnnnnnnnnnnnnnnnnnnnnnnnnnnnnnnnnnnnnnnnnnnnnnnnnnnnnnnnnnnnnnnnnnnnnnnnnnnnnnnnnnnnnnnnnnnnnnnnnnnnnnnnnnnnnnnnnnnnnnnnnnnnnnnnnnnnnnnnnnnnnnnnnnnnnnnnnnnnnnnnnnnnnnnnnnnnnnnnnnnnnnnnnnnnnnnnnnnnnnnnnnnnnnnnnnnnnnnnnnnnnnnnnnnnnnnnnnnnnnnnnnnnnnnnnnnnnnnnnnnnnnnnnnnnnnnnnnnnnnnnnnnnnnnnnnnnnnnnnnnnnnnnnnnnnnnnnnnnnnnnnnnnnnnnnnnnnnnnnnnnnnnnnnnnnnnnnnnnnnnnnnnnnnnnnnnnnnnnnnnnnnnnnnnnnnnnnnnnnnnnnnnnnnnnnnnnnnnnnnnnnnnnnnnnnnnnnnnnnnnnnnnnnnnnnnnnnnnnnnnnnnnnnnnnnnnnnnnnnnnnnnnnnnnnnnnnnnnnnnnnnnnnnnnnnnnnnnnnnnnnnnnnnnnnnnnnnnnnnnnnnnnnnnnnnnnnnnnnnnnnnnnnnnnnnnnnnnnnnnnnnnnnnnnnnnnnnnnnnnnnnnnnnnnnnnnnnnnnnnnnnnnnnnnnnnnnnnnnnnnnnnnnnnnnnnnnnnnnnnnnnnnnnnnnnnnnnnnnnnnnnnnnnnnnnnnnnnnnnnnnnnnnnnnnnnnnnnnnnnnnnnnnnnnnnnnnnnnnnnnnnnnnnnnnnnnnnnnnnnnnnnnnnnnnnnnnnnnnnnnnnnnnnnnnnnnnnnnnnnnnnnnnnnnnnnnnnnnnnnnnnnnnnnnnnnnnnnnnnnnnnnnnnnnnnnnnnnnnnnnnnnnnnnnnnnnnnnnnnnnnnnnnnnnnnnnnnnnnnnnnnnnnnnnnnnnnnnnnnnnnnnnnnnnnnnnnnnnnnnnnnnnnnnnnnnnnnnnnnnnnnnnnnnnnnnnnnnnnnnnnnnnnnnnnnnnnnnnnnnnnnnnnnnnnnnnnnnnnnnnnnnnnnnnnnnnnnnnnnnnnnnnnnnnnnnnnnnnnnnnnnnnnnnnnnnnnnnnnnnnnnnnnnnnnnnnnnnnnnnnnnnnnnnnnnnnnnnnnnnnnnnnnnnnnnnnnnnnnnnnnnnnnnnnnnnnnnnnnnnnnnnnnnnnnnnnnnnnnnnnnnnnnnnnnnnnnnnnnnnnnnnnnnnnnnnnnnnnnnnnnnnnnnnnnnnnnnnnnnnnnnnnnnnnnnnnnnnnnnnnnnnnnnnnnnnnnnnnnnnnnnnnnnnnnnnnnnnnnnnnnnnnnnnnnnnnnnnnnnnnnnnnnnnnnnnnnnnnnnnnnnnnnnnnnnnnnnnnnnnnnnnnnnnnnnnnnnnnnnnnnnnnnnnnnnnnnnnnnnnnnnnnnnnnnnnnnnnnnnnnnnnnnnnnnnnnnnnnnnnnnnnnnnnnnnnnnnnnnnnnnnnnnnnnnnnnnnnnnnnnnnnnnnnnnnnnnnnnnnnnnnnnnnnnnnnnnnnnnnnnnnnnnnnnnnnnnnnnnnnnnnnnnnnnnnnnnnnnnnnnnnnnnnnnnnnnnnnnnnnnnnnnnnnnnnnnnnnnnnnnnnnnnnnnnnnnnnnnnnnnnnnnnnnnnnnnnnnnnnnnnnnnnnnnnnnnnnnnnnnnnnnnnnnnnnnnnnnnnnnnnnnnnnnnnnnnnnnnnnnnnnnnnnnnnnnnnnnnnnnnnnnnnnnnnnnnnnnnnnnnnnnnnnnnnnnnnnnnnnnnnnnnnnnnnnnnnnnnnnnnnnnnnnnnnnnnnnnnnnnnnnnnnnnnnnnnnnnnnnnnnnnnnnnnnnnnnnnnnnnnnnnnnnnnnnnnnnnnnnnnnnnnnnnnnnnnnnnnnnnnnnnnnnnnnnnnnnnnnnnnnnnnnnnnnnnnnnnnnnnnnnnnnnnnnnnnnnnnnnnnnnnnnnnnnnnnnnnnnnnnnnnnnnnnnnnnnnnnnnnnnnnnnnnnnnnnnnnnnnnnnnnnnnnnnnnnnnnnnnnnnnnnnnnnnnnnnnnnnnnnnnnnnnnnnnnnnnnnnnnnnnnnnnnnnnnnnnnnnnnnnnnnnnnnnnnnnnnnnnnnnnnnnnnnnnnnnnnnnnnnnnnnnnnnnnnnnnnnnnnnnnnnnnnnnnnnnnnnnnnnnnnnnnnnnnnnnnnnnnnnnnnnnnnnnnnnnnnnnnnnnnnnnnnnnnnnnnnnnnnnnnnnnnnnnnnnnnnnnnnnnnnnnnnnnnnnnnnnnnnnnnnnnnnnnnnnnnnnnnnnnnnnnnnnnnnnnnnnnnnnnnnnnnnnnnnnnnnnnnnnnnnnnnnnnnnnnnnnnnnnnnnnnnnnnnnnnnnnnnnnnnnnnnnnnnnnnnnnnnnnnnnnnnnnnnnnnnnnnnnnnnnnnnnnnnnnnnnnnnnnnnnnnnnnnnnnnnnnnnnnnnnnnnnnnnnnnnnnnnnnnnnnnnnnnnnnnnnnnnnnnnnnnnnnnnnnnnnnnnnnnnnnnnnnnnnnnnnnnnnnnnnnnnnnnnnnnnnnnnnnnnnnnnnnnnnnnnnnnnnnnnnnnnnnnnnnnnnnnnnnnnnnnnnnnnnnnnnnnnnnnnnnnnnnnnnnnnnnnnnnnnnnnnnnnnnnnnnnnnnnnnnnnnnnnnnnnnnnnnnnnnnnnnnnnnnnnnnnnnnnnnnnnnnnnnnnnnnnnnnnnnnnnnnnnnnnnnnnnnnnnnnnnnnnnnnnnnnnnnnnnnnnnnnnnnnnnnnnnnnnnnnnnnnnnnnnnnnnnnnnnnnnnnnnnnnnnnnnnnnnnnnnnnnnnnnnnnnnnnnnnnnnnnnnnnnnnnnnnnnnnnnnnnnnnnnnnnnnnnnnnnnnnnnnnnnnnnnnnnnnnnnnnnnnnnnnnnnnnnnnnnnnnnnnnnnnnnnnnnnnnnnnnnnnnnnnnnnnnnnnnnnnnnnnnnnnnnnnnnnnnnnnnnnnnnnnnnnnnnnnnnnnnnnnnnnnnnnnnnnnnnnnnnnnnnnnnnnnnnnnnnnnnnnnnnnnnnnnnnnnnnnnnnnnnnnnnnnnnnnnnnnnnnnnnnnnnnnnnnnnnnnnnnnnnnnnnnnnnnnnnnnnnnnnnnnnnnnnnnnnnnnnnnnnnnnnnnnnnnnnnnnnnnnnnnnnnnnnnnnnnnnnnnnnnnnnnnnnnnnnnnnnnnnnnnnnnnnnnnnnnnnnnnnnnnnnnnnnnnnnnnnnnnnnnnnnnnnnnnnnnnnnnnnnnnnnnnnnnnnnnnnnnnnnnnnnnnnnnnnnnnnnnnnnnnnnnnnnnnnnnnnnnnnnnnnnnnnnnnnnnnnnnnnnnnnnnnnnnnnnnnnnnnnnnnnnnnnnnnnnnnnnnnnnnnnnnnnnnnnnnnnnnnnnnnnnnnnnnnnnnnnnnnnnnnnnnnnnnnnnnnnnnnnnnnnnnnnnnnnnnnnnnnnnnnnnnnnnnnnnnnnnnnnnnnnnnnnnnnnnnnnnnnnnnnnnnnnnnnnnnnnnnnnnnnnnnnnnnnnnnnnnnnnnnnnnnnnnnnnnnnnnnnnnnnnnnnnnnnnnnnnnnnnnnnnnnnnnnnnnnnnnnnnnnnnnnnnnnnnnnnnnnnnnnnnnnnnnnnnnnnnnnnnnnnnnnnnnnnnnnnnnnnnnnnnnnnnnnnnnnnnnnnnnnnnnnnnnnnnnnnnnnnnnnnnnnnnnnnnnnnnnnnnnnnnnnnnnnnnnnnnnnnnnnnnnnnnnnnnnnnnnnnnnnnnnnnnnnnnnnnnnnnnnnnnnnnnnnnnnnnnnnnnnnnnnnnnnnnnnnnnnnnnnnnnnnnnnnnnnnnnnnnnnnnnnnnnnnnnnnnnnnnnnnnnnnnnnnnnnnnnnnnnnnnnnnnnnnnnnnnnnnnnnnnnnnnnnnnnnnnnnnnnnnnnnnnnnnnnnnnnnnnnnnnnnnnnnnnnnnnnnnnnnnnnnnnnnnnnnnnnnnnnnnnnnnnnnnnnnnnnnnnnnnnnnnnnnnnnnnnnnnnnnnnnnnnnnnnnnnnnnnnnnnnnnnnnnnnnnnnnnnnnnnnnnnnnnnnnnnnnnnnnnnnnnnnnnnnnnnnnnnnnnnnnnnnnnnnnnnnnnnnnnnnnnnnnnnnnnnnnnnnnnnnnnnnnnnnnnnnnnnnnnnnnnnnnnnnnnnnnnnnnnnnnnnnnnnnnnnnnnnnnnnnnnnnnnnnnnnnnnnnnnnnnnnnnnnnnnnnnnnnnnnnnnnnnnnnnnnnnnnnnnnnnnnnnnnnnnnnnnnnnnnnnnnnnnnnnnnnnnnnnnnnnnnnnnnnnnnnnnnnnnnnnnnnnnnnnnnnnnnnnnnnnnnnnnnnnnnnnnnnnnnnnnnnnnnnnnnnnnnnnnnnnnnnnnnnnnnnnnnnnnnnnnnnnnnnnnnnnnnnnnnnnnnnnnnnnnnnnnnnnnnnnnnnnnnnnnnnnnnnnnnnnnnnnnnnnnnnnnnnnnnnnnnnnnnnnnnnnnnnnnnnnnnnnnnnnnnnnnnnnnnnnnnnnnnnnnnnnnnnnnnnnnnnnnnnnnnnnnnnnnnnnnnnnnnnnnnnnnnnnnnnnnnnnnnnnnnnnnnnnnnnnnnnnnnnnnnnnnnnnnnnnnnnnnnnnnnnnnnnnnnnnnnnnnnnnnnnnnnnnnnnnnnnnnnnnnnnnnnnnnnnnnnnnnnnnnnnnnnnnnnnnnnnnnnnnnnnnnnnnnnnnnnnnnnnnnnnnnnnnnnnnnnnnnnnnnnnnnnnnnnnnnnnnnnnnnnnnnnnnnnnnnnnnnnnnnnnnnnnnnnnnnnnnnnnnnnnnnnnnnnnnnnnnnnnnnnnnnnnnnnnnnnnnnnnnnnnnnnnnnnnnnnnnnnnnnnnnnnnnnnnnnnnnnnnnnnnnnnnnnnnnnnnnnnnnnnnnnnnnnnnnnnnnnnnnnnnnnnnnnnnnnnnnnnnnnnnnnnnnnnnnnnnnnnnnnnnnnnnnnnnnnnnnnnnnnnnnnnnnnnnnnnnnnnnnnnnnnnnnnnnnnnnnnnnnnnnnnnnnnnnnnnnnnnnnnnnnnnnnnnnnnnnnnnnnnnnnnnnnnnnnnnnnnnnnnnnnnnnnnnnnnnnnnnnnnnnnnnnnnnnnnnnnnnnnnnnnnnnnnnnnnnnnnnnnnnnnnnnnnnnnnnnnnnnnnnnnnnnnnnnnnnnnnnnnnnnnnnnnnnnnnnnnnnnnnnnnnnnnnnnnnnnnnnnnnnnnnnnnnnnnnnnnnnnnnnnnnnnnnnnnnnnnnnnnnnnnnnnnnnnnnnnnnnnnnnnnnnnnnnnnnnnnnnnnnnnnnnnnnnnnnnnnnnnnnnnnnnnnnnnnnnnnnnnnnnnnnnnnnnnnnnnnnnnnnnnnnnnnnnnnnnnnnnnnnnnnnnnnnnnnnnnnnnnnnnnnnnnnnnnnnnnnnnnnnnnnnnnnnnnnnnnnnnnnnnnnnnnnnnnnnnnnnnnnnnnnnnnnnnnnnnnnnnnnnnnnnnnnnnnnnnnnnnnnnnnnnnnnnnnnnnnnnnnnnnnnnnnnnnnnnnnnnnnnnnnnnnnnnnnnnnnnnnnnnnnnnnnnnnnnnnnnnnnnnnnnnnnnnnnnnnnnnnnnnnnnnnnnnnnnnnnnnnnnnnnnnnnnnnnnnnnnnnnnnnnnnnnnnnnnnnnnnnnnnnnnnnnnnnnnnnnnnnnnnnnnnnnnnnnnnnnnnnnnnnnnnnnnnnnnnnnnnnnnnnnnnnnnnnnnnnnnnnnnnnnnnnnnnnnnnnnnnnnnnnnnnnnnnnnnnnnnnnnnnnnnnnnnnnnnnnnnnnnnnnnnnnnnnnnnnnnnnnnnnnnnnnnnnnnnnnnnnnnnnnnnnnnnnnnnnnnnnnnnnnnnnnnnnnnnnnnnnnnnnnnnnnnnnnnnnnnnnnnnnnnnnnnnnnnnnnnnnnnnnnnnnnnnnnnnnnnnnnnnnnnnnnnnnnnnnnnnnnnnnnnnnnnnnnnnnnnnnnnnnnnnnnnnnnnnnnnnnnnnnnnnnnnnnnnnnnnnnnnnnnnnnnnnnnnnnnnnnnnnnnnnnnnnnnnnnnnnnnnnnnnnnnnnnnnnnnnnnnnnnnnnnnnnnnnnnnnnnnnnnnnnnnnnnnnnnnnnnnnnnnnnnnnnnnnnnnnnnnnnnnnnnnnnnnnnnnnnnnnnnnnnnnnnnnnnnnnnnnnnnnnnnnnnnnnnnnnnnnnnnnnnnnnnnnnnnnnnnnnnnnnnnnnnnnnnnnnnnnnnnnnnnnnnnnnnnnnnnnnnnnnnnnnnnnnnnnnnnnnnnnnnnnnnnnnnnnnnnnnnnnnnnnnnnnnnnnnnnnnnnnnnnnnnnnnnnnnnnnnnnnnnnnnnnnnnnnnnnnnnnnnnnnnnnnnnnnnnnnnnnnnnnnnnnnnnnnnnnnnnnnnnnnnnnnnnnnnnnnnnnnnnnnnnnnnnnnnnnnnnnnnnnnnnnnnnnnnnnnnnnnnnnnnnnnnnnnnnnnnnnnnnnnnnnnnnnnnnnnnnnnnnnnnnnnnnnnnnnnnnnnnnnnnnnnnnnnnnnnnnnnnnnnnnnnnnnnnnnnnnnnnnnnnnnnnnnnnnnnnnnnnnnnnnnnnnnnnnnnnnnnnnnnnnnnnnnnnnnnnnnnnnnnnnnnnnnnnnnnnnnnnnnnnnnnnnnnnnnnnnnnnnnnnnnnnnnnnnnnnnnnnnnnnnnnnnnnnnnnnnnnnnnnnnnnnnnnnnnnnnnnnnnnnnnnnnnnnnnnnnnnnnnnnnnnnnnnnnnnnnnnnnnnnnnnnnnnnnnnnnnnnnnnnnnnnnnnnnnnnnnnnnnnnnnnnnnnnnnnnnnnnnnnnnnnnnnnnnnnnnnnnnnnnnnnnnnnnnnnnnnnnnnnnnnnnnnnnnnnnnnnnnnnnnnnnnnnnnnnnnnnnnnnnnnnnnnnnnnnnnnnnnnnnnnnnnnnnnnnnnnnnnnnnnnnnnnnnnnnnnnnnnnnnnnnnnnnnnnnnnnnnnnnnnnnnnnnnnnnnnnnnnnnnnnnnnnnnnnnnnnnnnnnnnnnnnnnnnnnnnnnnnnnnnnnnnnnnnnnnnnnnnnnnnnnnnnnnnnnnnnnnnnnnnnnnnnnnnnnnnnnnnnnnnnnnnnnnnnnnnnnnnnnnnnnnnnnnnnnnnnnnnnnnnnnnnnnnnnnnnnnnnnnnnnnnnnnnnnnnnnnnnnnnnnnnnnnnnnnnnnnnnnnnnnnnnnnnnnnnnnnnnnnnnnnnnnnnnnnnnnnnnnnnnnnnnnnnnnnnnnnnnnnnnnnnnnnnnnnnnnnnnnnnnnnnnnnnnnnnnnnnnnnnnnnnnnnnnnnnnnnnnnnnnnnnnnnnnnnnnnnnnnnnnnnnnnnnnnnnnnnnnnnnnnnnnnnnnnnnnnnnnnnnnnnnnnnnnnnnnnnnnnnnnnnnnnnnnnnnnnnnnnnnnnnnnnnnnnnnnnnnnnnnnnnnnnnnnnnnnnnnnnnnnnnnnnnnnnnnnnnnnnnnnnnnnnnnnnnnnnnnnnnnnnnnnnnnnnnnnnnnnnnnnnnnnnnnnnnnnnnnnnnnnnnnnnnnnnnnnnnnnnnnnnnnnnnnnnnnnnnnnnnnnnnnnnnnnnnnnnnnnnnnnnnnnnnnnnnnnnnnnnnnnnnnnnnnnnnnnnnnnnnnnnnnnnnnnnnnnnnnnnnnnnnnnnnnnnnnnnnnnnnnnnnnnnnnnnnnnnnnnnnnnnnnnnnnnnnnnnnnnnnnnnnnnnnnnnnnnnnnnnnnnnnnnnnnnnnnnnnnnnnnnnnnnnnnnnnnnnnnnnnnnnnnnnnnnnnnnnnnnnnnnnnnnnnnnnnnnnnnnnnnnnnnnnnnnnnnnnnnnnnnnnnnnnnnnnnnnnnnnnnnnnnnnnnnnnnnnnnnnnnnnnnnnnnnnnnnnnnnnnnnnnnnnnnnnnnnnnnnnnnnnnnnnnnnnnnnnnnnnnnnnnnnnnnnnnnnnnnnnnnnnnnnnnnnnnnnnnnnnnnnnnnnnnnnnnnnnnnnnnnnnnnnnnnnnnnnnnnnnnnnnnnnnnnnnnnnnnnnnnnnnnnnnnnnnnnnnnnnnnnnnnnnnnnnnnnnnnnnnnnnnnnnnnnnnnnnnnnnnnnnnnnnnnnnnnnnnnnnnnnnnnnnnnnnnnnnnnnnnnnnnnnnnnnnnnnnnnnnnnnnnnnnnnnnnnnnnnnnnnnnnnnnnnnnnnnnnnnnnnnnnnnnnnnnnnnnnnnnnnnnnnnnnnnnnnnnnnnnnnnnnnnnnnnnnnnnnnnnnnnnnnnnnnnnnnnnnnnnnnnnnnnnnnnnnnnnnnnnnnnnnnnnnnnnnnnnnnnnnnnnnnnnnnnnnnnnnnnnnnnnnnnnnnnnnnnnnnnnnnnnnnnnnnnnnnnnnnnnnnnnnnnnnnnnnnnnnnnnnnnnnnnnnnnnnnnnnnnnnnnnnnnnnnnnnnnnnnnnnnnnnnnnnnnnnnnnnnnnnnnnnnnnnnnnnnnnnnnnnnnnnnnnnnnnnnnnnnnnnnnnnnnnnnnnnnnnnnnnnnnnnnnnnnnnnnnnnnnnnnnnnnnnnnnnnnnnnnnnnnnnnnnnnnnnnnnnnnnnnnnnnnnnnnnnnnnnnnnnnnnnnnnnnnnnnnnnnnnnnnnnnnnnnnnnnnnnnnnnnnnnnnnnnnnnnnnnnnnnnnnnnnnnnnnnnnnnnnnnnnnnnnnnnnnnnnnnnnnnnnnnnnnnnnnnnnnnnnnnnnnnnnnnnnnnnnnnnnnnnnnnnnnnnnnnnnnnnnnnnnnnnnnnnnnnnnnnnnnnnnnnnnnnnnnnnnnnnnnnnnnnnnnnnnnnnnnnnnnnnnnnnnnnnnnnnnnnnnnnnnnnnnnnnnnnnnnnnnnnnnnnnnnnnnnnnnnnnnnnnnnnnnnnnnnnnnnnnnnnnnnnnnnnnnnnnnnnnnnnnnnnnnnnnnnnnnnnnnnnnnnnnnnnnnnnnnnnnnnnnnnnnnnnnnnnnnnnnnnnnnnnnnnnnnnnnnnnnnnnnnnnnnnnnnnnnnnnnnnnnnnnnnnnnnnnnnnnnnnnnnnnnnnnnnnnnnnnnnnnnnnnnnnnnnnnnnnnnnnnnnnnnnnnnnnnnnnnnnnnnnnnnnnnnnnnnnnnnnnnnnnnnnnnnnnnnnnnnnnnnnnnnnnnnnnnnnnnnnnnnnnnnnnnnnnnnnnnnnnnnnnnnnnnnnnnnnnnnnnnnnnnnnnnnnnnnnnnnnnnnnnnnnnnnnnnnnnnnnnnnnnnnnnnnnnnnnnnnnnnnnnnnnnnnnnnnnnnnnnnnnnnnnnnnnnnnnnnnnnnnnnnnnnnnnnnnnnnnnnnnnnnnnnnnnnnnnnnnnnnnnnnnnnnnnnnnnnnnnnnnnnnnnnnnnnnnnnnnnnnnnnnnnnnnnnnnnnnnnnnnnnnnnnnnnnnnnnnnnnnnnnnnnnnnnnnnnnnnnnnnnnnnnnnnnnnnnnnnnnnnnnnnnnnnnnnnnnnnnnnnnnnnnnnnnnnnnnnnnnnnnnnnnnnnnnnnnnnnnnnnnnnnnnnnnnnnnnnnnnnnnnnnnnnnnnnnnnnnnnnnnnnnnnnnnnnnnnnnnnnnnnnnnnnnnnnnnnnnnnnnnnnnnnnnnnnnnnnnnnnnnnnnnnnnnnnnnnnnnnnnnnnnnnnnnnnnnnnnnnnnnnnnnnnnnnnnnnnnnnnnnnnnnnnnnnnnnnnnnnnnnnnnnnnnnnnnnnnnnnnnnnnnnnnnnnnnnnnnnnnnnnnnnnnnnnnnnnnnnnnnnnnnnnnnnnnnnnnnnnnnnnnnnnnnnnnnnnnnnnnnnnnnnnnnnnnnnnnnnnnnnnnnnnnnnnnnnnnnnnnnnnnnnnnnnnnnnnnnnnnnnnnnnnnnnnnnnnnnnnnnnnnnnnnnnnnnnnnnnnnnnnnnnnnnnnnnnnnnnnnnnnnnnnnnnnnnnnnnnnnnnnnnnnnnnnnnnnnnnnnnnnnnnnnnnnnnnnnnnnnnnnnnnnnnnnnnnnnnnnnnnnnnnnnnnnnnnnnnnnnnnnnnnnnnnnnnnnnnnnnnnnnnnnnnnnnnnnnnnnnnnnnnnnnnnnnnnnnnnnnnnnnnnnnnnnnnnnnnnnnnnnnnnnnnnnnnnnnnnnnnnnnnnnnnnnnnnnnnnnnnnnnnnnnnnnnnnnnnnnnnnnnnnnnnnnnnnnnnnnnnnnnnnnnnnnnnnnnnnnnnnnnnnnnnnnnnnnnnnnnnnnnnnnnnnnnnnnnnnnnnnnnnnnnnnnnnnnnnnnnnnnnnnnnnnnnnnnnnnnnnnnnnnnnnnnnnnnnnnnnnnnnnnnnnnnnnnnnnnnnnnnnnnnnnnnnnnnnnnnnnnnnnnnnnnnnnnnnnnnnnnnnnnnnnnnnnnnnnnnnnnnnnnnnnnnnnnnnnnnnnnnnnnnnnnnnnnnnnnnnnnnnnnnnnnnnnnnnnnnnnnnnnnnnnnnnnnnnnnnnnnnnnnnnnnnnnnnnnnnnnnnnnnnnnnnnnnnnnnnnnnnnnnnnnnnnnnnnnnnnnnnnnnnnnnnnnnnnnnnnnnnnnnnnnnnnnnnnnnnnnnnnnnnnnnnnnnnnnnnnnnnnnnnnnnnnnnnnnnnnnnnnnnnnnnnnnnnnnnnnnnnnnnnnnnnnnnnnnnnnnnnnnnnnnnnnnnnnnnnnnnnnnnnnnnnnnnnnnnnnnnnnnnnnnnnnnnnnnnnnnnnnnnnnnnnnnnnnnnnnnnnnnnnnnnnnnnnnnnnnnnnnnnnnnnnnnnnnnnnnnnnnnnnnnnnnnnnnnnnnnnnnnnnnnnnnnnnnnnnnnnnnnnnnnnnnnnnnnnnnnnnnnnnnnnnnnnnnnnnnnnnnnnnnnnnnnnnnnnnnnnnnnnnnnnnnnnnnnnnnnnnnnnnnnnnnnnnnnnnnnnnnnnnnnnnnnnnnnnnnnnnnnnnnnnnnnnnnnnnnnnnnnnnnnnnnnnnnnnnnnnnnnnnnnnnnnnnnnnnnnnnnnnnnnnnnnnnnnnnnnnnnnnnnnnnnnnnnnnnnnnnnnnnnnnnnnnnnnnnnnnnnnnnnnnnnnnnnnnnnnnnnnnnnnnnnnnnnnnnnnnnnnnnnnnnnnnnnnnnnnnnnnnnnnnnnnnnnnnnnnnnnnnnnnnnnnnnnnnnnnnnnnnnnnnnnnnnnnnnnnnnnnnnnnnnnnnnnnnnnnnnnnnnnnnnnnnnnnnnnnnnnnnnnnnnnnnnnnnnnnnnnnnnnnnnnnnnnnnnnnnnnnnnnnnnnnnnnnnnnnnnnnnnnnnnnnnnnnnnnnnnnnnnnnnnnnnnnnnnnnnnnnnnnnnnnnnnnnnnnnnnnnnnnnnnnnnnnnnnnnnnnnnnnnnnnnnnnnnnnnnnnnnnnnnnnnnnnnnnnnnnnnnnnnnnnnnnnnnnnnnnnnnnnnnnnnnnnnnnnnnnnnnnnnnnnnnnnnnnnnnnnnnnnnnnnnnnnnnnnnnnnnnnnnnnnnnnnnnnnnnnnnnnnnnnnnnnnnnnnnnnnnnnnnnnnnnnnnnnnnnnnnnnnnnnnnnnnnnnnnnnnnnnnnnnnnnnnnnnnnnnnnnnnnnnnnnnnnnnnnnnnnnnnnnnnnnnnnnnnnnnnnnnnnnnnnnnnnnnnnnnnnnnnnnnnnnnnnnnnnnnnnnnnnnnnnnnnnnnnnnnnnnnnnnnnnnnnnnnnnnnnnnnnnnnnnnnnnnnnnnnnnnnnnnnnnnnnnnnnnnnnnnnnnnnnnnnnnnnnnnnnnnnnnnnnnnnnnnnnnnnnnnnnnnnnnnnnnnnnnnnnnnnnnnnnnnnnnnnnnnnnnnnnnnnnnnnnnnnnnnnnnnnnnnnnnnnnnnnnnnnnnnnnnnnnnnnnnnnnnnnnnnnnnnnnnnnnnnnnnnnnnnnnnnnnnnnnnnnnnnnnnnnnnnnnnnnnnnnnnnnnnnnnnnnnnnnnnnnnnnnnnnnnnnnnnnnnnnnnnnnnnnnnnnnnnnnnnnnnnnnnnnnnnnnnnnnnnnnnnnnnnnnnnnnnnnnnnnnnnnnnnnnnnnnnnnnnnnnnnnnnnnnnnnnnnnnnnnnnnnnnnnnnnnnnnnnnnnnnnnnnnnnnnnnnnnnnnnnnnnnnnnnnnnnnnnnnnnnnnnnnnnnnnnnnnnnnnnnnnnnnnnnnnnnnnnnnnnnnnnnnnnnnnnnnnnnnnnnnnnnnnnnnnnnnnnnnnnnnnnnnnnnnnnnnnnnnnnnnnnnnnnnnnnnnnnnnnnnnnnnnnnnnnnnnnnnnnnnnnnnnnnnnnnnnnnnnnnnnnnnnnnnnnnnnnnnnnnnnnnnnnnnnnnnnnnnnnnnnnnnnnnnnnnnnnnnnnnnnnnnnnnnnnnnnnnnnnnnnnnnnnnnnnnnnnnnnnnnnnnnnnnnnnnnnnnnnnnnnnnnnnnnnnnnnnnnnnnnnnnnnnnnnnnnnnnnnnnnnnnnnnnnnnnnnnnnnnnnnnnnnnnnnnnnnnnnnnnnnnnnnnnnnnnnnnnnnnnnnnnnnnnnnnnnnnnnnnnnnnnnnnnnnnnnnnnnnnnnnnnnnnnnnnnnnnnnnnnnnnnnnnnnnnnnnnnnnnnnnnnnnnnnnnnnnnnnnnnnnnnnnnnnnnnnnnnnnnnnnnnnnnnnnnnnnnnnnnnnnnnnnnnnnnnnnnnnnnnnnnnnnnnnnnnnnnnnnnnnnnnnnnnnnnnnnnnnnnnnnnnnnnnnnnnnnnnnnnnnnnnnnnnnnnnnnnnnnnnnnnnnnnnnnnnnnnnnnnnnnnnnnnnnnnnnnnnnnnnnnnnnnnnnnnnnnnnnnnnnnnnnnnnnnnnnnnnnnnnnnnnnnnnnnnnnnnnnnnnnnnnnnnnnnnnnnnnnnnnnnnnnnnnnnnnnnnnnnnnnnnnnnnnnnnnnnnnnnnnnnnnnnnnnnnnnnnnnnnnnnnnnnnnnnnnnnnnnnnnnnnnnnnnnnnnnnnnnnnnnnnnnnnnnnnnnnnnnnnnnnnnnnnnnnnnnnnnnnnnnnnnnnnnnnnnnnnnnnnnnnnnnnnnnnnnnnnnnnnnnnnnnnnnnnnnnnnnnnnnnnnnnnnnnnnnnnnnnnnnnnnnnnnnnnnnnnnnnnnnnnnnnnnnnnnnnnnnnnnnnnnnnnnnnnnnnnnnnnnnnnnnnnnnnnnnnnnnnnnnnnnnnnnnnnnnnnnnnnnnnnnnnnnnnnnnnnnnnnnnnnnnnnnnnnnnnnnnnnnnnnnnnnnnnnnnnnnnnnnnnnnnnnnnnnnnnnnnnnnnnnnnnnnnnnnnnnnnnnnnnnnnnnnnnnnnnnnnnnnnnnnnnnnnnnnnnnnnnnnnnnnnnnnnnnnnnnnnnnnnnnnnnnnnnnnnnnnnnnnnnnnnnnnnnnnnnnnnnnnnnnnnnnnnnnnnnnnnnnnnnnnnnnnnnnnnnnnnnnnnnnnnnnnnnnnnnnnnnnnnnnnnnnnnnnnnnnnnnnnnnnnnnnnnnnnnnnnnnnnnnnnnnnnnnnnnnnnnnnnnnnnnnnnnnnnnnnnnnnnnnnnnnnnnnnnnnnnnnnnnnnnnnnnnnnnnnnnnnnnnnnnnnnnnnnnnnnnnnnnnnnnnnnnnnnnnnnnnnnnnnnnnnnnnnnnnnnnnnnnnnnnnnnnnnnnnnnnnnnnnnnnnnnnnnnnnnnnnnnnnnnnnnnnnnnnnnnnnnnnnnnnnnnnnnnnnnnnnnnnnnnnnnnnnnnnnnnnnnnnnnnnnnnnnnnnnnnnnnnnnnnnnnnnnnnnnnnnnnnnnnnnnnnnnnnnnnnnnnnnnnnnnnnnnnnnnnnnnnnnnnnnnnnnnnnnnnnnnnnnnnnnnnnnnnnnnnnnnnnnnnnnnnnnnnnnnnnnnnnnnnnnnnnnnnnnnnnnnnnnnnnnnnnnnnnnnnnnnnnnnnnnnnnnnnnnnnnnnnnnnnnnnnnnnnnnnnnnnnnnnnnnnnnnnnnnnnnnnnnnnnnnnnnnnnnnnnnnnnnnnnnnnnnnnnnnnnnnnnnnnnnnnnnnnnnnnnnnnnnnnnnnnnnnnnnnnnnnnnnnnnnnnnnnnnnnnnnnnnnnnnnnnnnnnnnnnnnnnnnnnnnnnnnnnnnnnnnnnnnnnnnnnnnnnnnnnnnnnnnnnnnnnnnnnnnnnnnnnnnnnnnnnnnnnnnnnnnnnnnnnnnnnnnnnnnnnnnnnnnnnnnnnnnnnnnnnnnnnnnnnnnnnnnnnnnnnnnnnnnnnnnnnnnnnnnnnnnnnnnnnnnnnnnnnnnnnnnnnnnnnnnnnnnnnnnnnnnnnnnnnnnnnnnnnnnnnnnnnnnnnnnnnnnnnnnnnnnnnnnnnnnnnnnnnnnnnnnnnnnnnnnnnnnnnnnnnnnnnnnnnnnnnnnnnnnnnnnnnnnnnnnnnnnnnnnnnnnnnnnnnnnnnnnnnnnnnnnnnnnnnnnnnnnnnnnnnnnnnnnnnnnnnnnnnnnnnnnnnnnnnnnnnnnnnnnnnnnnnnnnnnnnnnnnnnnnnnnnnnnnnnnnnnnnnnnnnnnnnnnnnnnnnnnnnnnnnnnnnnnnnnnnnnnnnnnnnnnnnnnnnnnnnnnnnnnnnnnnnnnnnnnnnnnnnnnnnnnnnnnnnnnnnnnnnnnnnnnnnnnnnnnnnnnnnnnnnnnnnnnnnnnnnnnnnnnnnnnnnnnnnnnnnnnnnnnnnnnnnnnnnnnnnnnnnnnnnnnnnnnnnnnnnnnnnnnnnnnnnnnnnnnnnnnnnnnnnnnnnnnnnnnnnnnnnnnnnnnnnnnnnnnnnnnnnnnnnnnnnnnnnnnnnnnnnnnnnnnnnnnnnnnnnnnnnnnnnnnnnnnnnnnnnnnnnnnnnnnnnnnnnnnnnnnnnnnnnnnnnnnnnnnnnnnnnnnnnnnnnnnnnnnnnnnnnnnnnnnnnnnnnnnnnnnnnnnnnnnnnnnnnnnnnnnnnnnnnnnnnnnnnnnnnnnnnnnnnnnnnnnnnnnnnnnnnnnnnnnnnnnnnnnnnnnnnnnnnnnnnnnnnnnnnnnnnnnnnnnnnnnnnnnnnnnnnnnnnnnnnnnnnnnnnnnnnnnnnnnnnnnnnnnnnnnnnnnnnnnnnnnnnnnnnnnnnnnnnnnnnnnnnnnnnnnnnnnnnnnnnnnnnnnnnnnnnnnnnnnnnnnnnnnnnnnnnnnnnnnnnnnnnnnnnnnnnnnnnnnnnnnnnnnnnnnnnnnnnnnnnnnnnnnnnnnnnnnnnnnnnnnnnnnnnnnnnnnnnnnnnnnnnnnnnnnnnnnnnnnnnnnnnnnnnnnnnnnnnnnnnnnnnnnnnnnnnnnnnnnnnnnnnnnnnnnnnnnnnnnnnnnnnnnnnnnnnnnnnnnnnnnnnnnnnnnnnnnnnnnnnnnnnnnnnnnnnnnnnnnnnnnnnnnnnnnnnnnnnnnnnnnnnnnnnnnnnnnnnnnnnnnnnnnnnnnnnnnnnnnnnnnnnnnnnnnnnnnnnnnnnnnnnnnnnnnnnnnnnnnnnnnnnnnnnnnnnnnnnnnnnnnnnnnnnnnnnnnnnnnnnnnnnnnnnnnnnnnnnnnnnnnnnnnnnnnnnnnnnnnnnnnnnnnnnnnnnnnnnnnnnnnnnnnnnnnnnnnnnnnnnnnnnnnnnnnnnnnnnnnnnnnnnnnnnnnnnnnnnnnnnnnnnnnnnnnnnnnnnnnnnnnnnnnnnnnnnnnnnnnnnnnnnnnnnnnnnnnnnnnnnnnnnnnnnnnnnnnnnnnnnnnnnnnnnnnnnnnnnnnnnnnnnnnnnnnnnnnnnnnnnnnnnnnnnnnnnnnnnnnnnnnnnnnnnnnnnnnnnnnnnnnnnnnnnnnnnnnnnnnnnnnnnnnnnnnnnnnnnnnnnnnnnnnnnnnnnnnnnnnnnnnnnnnnnnnnnnnnnnnnnnnnnnnnnnnnnnnnnnnnnnnnnnnnnnnnnnnnnnnnnnnnnnnnnnnnnnnnnnnnnnnnnnnnnnnnnnnnnnnnnnnnnnnnnnnnnnnnnnnnnnnnnnnnnnnnnnnnnnnnnnnnnnnnnnnnnnnnnnnnnnnnnnnnnnnnnnnnnnnnnnnnnnnnnnnnnnnnnnnnnnnnnnnnnnnnnnnnnnnnnnnnnnnnnnnnnnnnnnnnnnnnnnnnnnnnnnnnnnnnnnnnnnnnnnnnnnnnnnnnnnnnnnnnnnnnnnnnnnnnnnnnnnnnnnnnnnnnnnnnnnnnnnnnnnnnnnnnnnnnnnnnnnnnnnnnnnnnnnnnnnnnnnnnnnnnnnnnnnnnnnnnnnnnnnnnnnnnnnnnnnnnnnnnnnnnnnnnnnnnnnnnnnnnnnnnnnnnnnnnnnnnnnnnnnnnnnnnnnnnnnnnnnnnnnnnnnnnnnnnnnnnnnnnnnnnnnnnnnnnnnnnnnnnnnnnnnnnnnnnnnnnnnnnnnnnnnnnnnnnnnnnnnnnnnnnnnnnnnnnnnnnnnnnnnnnnnnnnnnnnnnnnnnnnnnnnnnnnnnnnnnnnnnnnnnnnnnnnnnnnnnnnnnnnnnnnnnnnnnnnnnnnnnnnnnnnnnnnnnnnnnnnnnnnnnnnnnnnnnnnnnnnnnnnnnnnnnnnnnnnnnnnnnnnnnnnnnnnnnnnnnnnnnnnnnnnnnnnnnnnnnnnnnnnnnnnnnnnnnnnnnnnnnnnnnnnnnnnnnnnnnnnnnnnnnnnnnnnnnnnnnnnnnnnnnnnnnnnnnnnnnnnnnnnnnnnnnnnnnnnnnnnnnnnnnnnnnnnnnnnnnnnnnnnnnnnnnnnnnnnnnnnnnnnnnnnnnnnnnnnnnnnnnnnnnnnnnnnnnnnnnnnnnnnnnnnnnnnnnnnnnnnnnnnnnnnnnnnnnnnnnnnnnnnnnnnnnnnnnnnnnnnnnnnnnnnnnnnnnnnnnnnnnnnnnnnnnnnnnnnnnnnnnnnnnnnnnnnnnnnnnnnnnnnnnnnnnnnnnnnnnnnnnnnnnnnnnnnnnnnnnnnnnnnnnnnnnnnnnnnnnnnnnnnnnnnnnnnnnnnnnnnnnnnnnnnnnnnnnnnnnnnnnnnnnnnnnnnnnnnnnnnnnnnnnnnnnnnnnnnnnnnnnnnnnnnnnnnnnnnnnnnnnnnnnnnnnnnnnnnnnnnnnnnnnnnnnnnnnnnnnnnnnnnnnnnnnnnnnnnnnnnnnnnnnnnnnnnnnnnnnnnnnnnnnnnnnnnnnnnnnnnnnnnnnnnnnnnnnnnnnnnnnnnnnnnnnnnnnnnnnnnnnnnnnnnnnnnnnnnnnnnnnnnnnnnnnnnnnnnnnnnnnnnnnnnnnnnnnnnnnnnnnnnnnnnnnnnnnnnnnnnnnnnnnnnnnnnnnnnnnnnnnnnnnnnnnnnnnnnnnnnnnnnnnnnnnnnnnnnnnnnnnnnnnnnnnnnnnnnnnnnnnnnnnnnnnnnnnnnnnnnnnnnnnnnnnnnnnnnnnnnnnnnnnnnnnnnnnnnnnnnnnnnnnnnnnnnnnnnnnnnnnnnnnnnnnnnnnnnnnnnnnnnnnnnnnnnnnnnnnnnnnnnnnnnnnnnnnnnnnnnnnnnnnnnnnnnnnnnnnnnnnnnnnnnnnnnnnnnnnnnnnnnnnnnnnnnnnnnnnnnnnnnnnnnnnnnnnnnnnnnnnnnnnnnnnnnnnnnnnnnnnnnnnnnnnnnnnnnnnnnnnnnnnnnnnnnnnnnnnnnnnnnnnnnnnnnnnnnnnnnnnnnnnnnnnnnnnnnnnnnnnnnnnnnnnnnnnnnnnnnnnnnnnnnnnnnnnnnnnnnnnnnnnnnnnnnnnnnnnnnnnnnnnnnnnnnnnnnnnnnnnnnnnnnnnnnnnnnnnnnnnnnnnnnnnnnnnnnnnnnnnnnnnnnnnnnnnnnnnnnnnnnnnnnnnnnnnnnnnnnnnnnnnnnnnnnnnnnnnnnnnnnnnnnnnnnnnnnnnnnnnnnnnnnnnnnnnnnnnnnnnnnnnnnnnnnnnnnnnnnnnnnnnnnnnnnnnnnnnnnnnnnnnnnnnnnnnnnnnnnnnnnnnnnnnnnnnnnnnnnnnnnnnnnnnnnnnnnnnnnnnnnnnnnnnnnnnnnnnnnnnnnnnnnnnnnnnnnnnnnnnnnnnnnnnnnnnnnnnnnnnnnnnnnnnnnnnnnnnnnnnnnnnnnnnnnnnnnnnnnnnnnnnnnnnnnnnnnnnnnnnnnnnnnnnnnnnnnnnnnnnnnnnnnnnnnnnnnnnnnnnnnnnnnnnnnnnnnnnnnnnnnnnnnnnnnnnnnnnnnnnnnnnnnnnnnnnnnnnnnnnnnnnnnnnnnnnnnnnnnnnnnnnnnnnnnnnnnnnnnnnnnnnnnnnnnnnnnnnnnnnnnnnnnnnnnnnnnnnnnnnnnnnnnnnnnnnnnnnnnnnnnnnnnnnnnnnnnnnnnnnnnnnnnnnnnnnnnnnnnnnnnnnnnnnnnnnnnnnnnnnnnnnnnnnnnnnnnnnnnnnnnnnnnnnnnnnnnnnnnnnnnnnnnnnnnnnnnnnnnnnnnnnnnnnnnnnnnnnnnnnnnnnnnnnnnnnnnnnnnnnnnnnnnnnnnnnnnnnnnnnnnnnnnnnnnnnnnnnnnnnnnnnnnnnnnnnnnnnnnnnnnnnnnnnnnnnnnnnnnnnnnnnnnnnnnnnnnnnnnnnnnnnnnnnnnnnnnnnnnnnnnnnnnnnnnnnnnnnnnnnnnnnnnnnnnnnnnnnnnnnnnnnnnnnnnnnnnnnnnnnnnnnnnnnnnnnnnnnnnnnnnnnnnnnnnnnnnnnnnnnnnnnnnnnnnnnnnnnnnnnnnnnnnnnnnnnnnnnnnnnnnnnnnnnnnnnnnnnnnnnnnnnnnnnnnnnnnnnnnnnnnnnnnnnnnnnnnnnnnnnnnnnnnnnnnnnnnnnnnnnnnnnnnnnnnnnnnnnnnnnnnnnnnnnnnnnnnnnnnnnnnnnnnnnnnnnnnnnnnnnnnnnnnnnnnnnnnnnnnnnnnnnnnnnnnnnnnnnnnnnnnnnnnnnnnnnnnnnnnnnnnnnnnnnnnnnnnnnnnnnnnnnnnnnnnnnnnnnnnnnnnnnnnnnnnnnnnnnnnnnnnnnnnnnnnnnnnnnnnnnnnnnnnnnnnnnnnnnnnnnnnnnnnnnnnnnnnnnngatctctactctgaaaacgacaaaacatggataaaaaatataaaatacaaatgaataaatgaaaaaatattgtgtttatacactggaagaatactcttgatctatctacccaaagtgatctacagacttaatgtgatttttatcaaagtaccaatgacattttttcacagaaataaaaaaaatttaaatttatatggatccacaaaaaactctgaatagacaaagcaactttgagcaaaataagcaaagctaaaggcatcacttcatcaaacttcaaaacttgctataaagctacagtaaccaaaacagcactgtactggcataaaaacaaactcatagactaatgtgccgaataagcccagaagttaatttatgcacctaaagccaactgattgtcaacaaaattgccaagaacacactttagagaaaagctaatctctttaataaatggtgcagggccacttaaatatttatatgcagaaaaataatactagacccttgtaccttgccatatatgataatcaactaaaactaaagacttaaatgtaatgccatcaattatgaaactattagagaaaaacataaaaaaatgctttataacattggatggggaaaggattattaaaataagatttcaaaacatgggcaacaaaatcgagaataagcaaacaacattatgtcaaactaaaatgcttttccatattaaaaaaacaactagaagtttgaagagacagcttaggcaatgacagaaaatgttttcatatacatgtgacaaaaggctaatattcagaatatataagaaactttaaaatctcaaaataaaatacacttataatctaactttaaaaatgcaaaagatcttaatagatgtttgtcaaaaagagatacaaaaatgctaactggaacataaaaagatgctctacattactaatcaccaaggaaatgcaaatccaaaccataatgaagtaccgcctcattcccattagagtggctataataaaaataaataaataaatcaagaactaatgaggatataaaaaagagtggatgtataccttgttggtggaattgtaaattagtatggccattatagaaaatagtatggaggtttctgaaagaaattaaaaatatatctattatatgatccagcaattttacttctgggtgtatatccaaaagaaaggatattactgtgtcaaaaagatatttgcattcccatgttcattacagaactatttataatagcttatatatggaatcaattcaaatgtacagcaacagataaatggataaggaaaatgtactatatatacacagcgaaatactattcagccataagaaagcataaaattctgtcagttaaaagagcatggatgaaccttgagcataccatgttaagtaaaataagccacatagagaaacacaaatactttatgatcttattatctcactcatttgaggaacctgaaaaaaagggttgatagaagcaaagagtacaacaggggttaccagagactgaagcaggaggatgggaaaaggttgcttcacaggtattgtgttatgattagataggggaaataagtttttgttttttattacacagtagaataataataattaatgaaaagttatctcatattacaaaatagctaaaagagaccagtttcggtggcacattcttgcaatccatacattttgggagactgaggtaggagaatcacttgacgtcagaagttcaagatgagcctggacaacatagtgtgaccctgtctctatgaaaaattaaaacattagccaggcatggtggcagcttcctgtagtctcagctaattgggaaactaaggttagaagactgtttgaagttacagtgagctaagattgcaccactgcacaccagtctgggtgttagagcaagatcctgtctctaaaaaaatttaatacttaaagataaaataaaatagctagagaagaagcttttgaatattctcaccacaaaaataacaaatgcatgaggcaacaagtatagaagtactctgatttttattgttatacaacatatatatataattgtttccccaaaatatgcacaattacatgtgtcaattttaaaaaatgaatgaagactataatgtaaaacctatagctgtaaaattcctagcacaatacagaagggtgaagcttcatgacaactggtcgtggcaataatttgggggacgtaacatcaacggatgagacaacaaaagcaagggaatacacatggtactgaatcagtgtatgaaaaatatcccaaacagacaaagcagaacatggaatagatatatgcacattgtagtattagtcacaaacatgttacctggaagcaaatgtacccttaaggatgagtagattcagcaaacagggcacgtacaatcactgggatagcattcagccttaaaaataaggaaatcttgaaaagtactacaataaggacaaatattcaaaacattctgttaagtaaaataagacagtcaaaaaggaaagctgtataattacactcatgtaaaatatttagtcaaactcaaagaaaccaagtgtcatagtctcagcagtgcaccaagatgtaacagtctctcgtagtctgagataacatccagagttctttgttctacctctaaggagattaaggagtgtaaacacaaaggtgaggttggagtgaaagtttaagaagcaagagaagaaagctctttgccagcagagataggtgtctgaaagtggtgccctctacgaggctgggtccagggtttttatggactgggaagggaaggatatgtgcctagttcacaggctgtcttgaaaaacgtgtggctcagcttggcccaggcctttggcccaggaccaatcaggagctgaagggatgattgatagatgctgcttagcttggcccaagacttaccagaagctaaggtgaaagtttggccaaggagcttggcacgggagcaatcaggggctgaagtaattattcatagaggtcagacttacagtccaaataaaggagaatgtctaccggaatgtaccagattccacagtgtccatgccaacaaaaagagaaggaacattttcctgggagcccactgactgtacaaagacaaaggtgtttcttttttttttctttttcttgtctttctttcttttttttgagatgtactttctttttttattttattttattttttttgcagttttgctcttgttgcccagcctggagtgcaatggtgcgatctcggctcacagcaacctccacctcctgggttctagcgattctcctgcctcagcctcccaagtagctgggattataggcatgcagcaccatgcctggctagttttgtatttttagtaaagacagggtttgtccatcttggtcatgctggtctcaaactcccgacctcagatgatccgcccacagctgcctccgacattgttggaattacaggcatgatccaccgtggctggccaaacaaaggcatttctgtgctaggtcgttcttgttcctttatctgagtgagctggaggtttgtacaagtttttatccaaatgggccagaggtttttctatctctgcagccacgggcatgtctccaagcacaacaacatatgttagttcccttgttagtgtctgcagcttgattttttccaggcttctttacatgttatgcagggatgaggcactgaccagggactttccagggactcttctcttgctatctacctaaggtaagctaactaacttctttcacaagtaatgagtattcacttttacttttgtaagacaaaaattatctaaaagctactgcaaaacaatagaactatactaaccacttctaaaccatatacttaaaatttcagaaatgacaatggcatgtttttaactacaattagaaatttaagactaactaaaaggcacagttagaaaacctttcaaacatcaccttcaaataacaaagggttattctcacacaattatatggatttaaactatatgttgattgtaaatttaagattatttccctgatgactcaccaagatagaataaaataatcactggaaaccaagaaaagagggaaatttatagcactaatgtccacatcaaaaagctagaaagggctgggcgtggtggctcatgcctgtaattccagcactttgggaggctggggtaggcaaatcacttaaggccagatgttcaagaccagcctggaacacacagcaaaaccccacctctacaaaaaaaaattcaaaaattagctggtttttgtgatgcacatctgtaatcccagctactcaggaagctgagacagcagaaatcacttaaaactgagaagtggaggttgcagtgagcagagatcatgccactgtactccagcctgggtgacagagtgagactctgccacaagaaaaaaaagagaaactagaaagatctaaagttaacagcctaacatcttgattaaaagaactagaaaaccaagtgaaaactaaccagaaaggtagcagaaaacaagaaataaccaagatcaaagtagagctgaaggagatagagacactgaaaactcttccaaaaaaaaaaagtcaacaaatccaggagctgttttatgaaaaaaattaataaactagatggaacactagctaggcaaataaataagaaaagaaaggagaaccaaacacaattagaaataataagggagatatcatcactggtcccatggaaataagaacaaccatcagagaacactataaacatctgtatgcacataaaccagaaaatctagaatagacaatttccttgcaaaataaaccctccacaagactgaaccctgaatagatcaataatgtgttctgaaactgaggcagtaataactagcctaccaagcaagctgaatttgaccagaggtacaaagaggagatggtaccttttctcctaaaaccatccaaaaaaaattgaagacaaagttctctgtaactcattctatcaggccagcatcatccagataccaaaacctaacatagatactacaacaacaacaacaacaacaacaacacatcatgccaatgtctttggtaaacactgtgcaaaaatcctcaataaaatactggcaaaccaaatccagcagcatattaaaaagttcatctgcaacaatggagttggctttgtccccaggatgcaaggttgattcaacaaatgcaaatcaataaatgtgactcatcacataaagagaactaaataaaaagccacatgattatctcaataaatgcagaaaaagcatccaataaaattcagcattccttcaggtttaaaattctcaataaactaggaagtgaagaaacatacctgaaaataataagagccatatacaacaaacccacaaccaatatcatactgaatgtgcaaaagctagaaacgttccacctgaaaactggcacaagaaaagaatgccctctttcaccactaccattcaatatagtatcagaagccttggccaggaaaatcaggccagaggaagaaataaagagtattctaatagaaagagaggaagtcaaattatctttgtttgcagatgacctgatcctacatctagaaaacctcattgtctcaggcccaaagcttcttaaggtgataagcaacagtagcaaaatctcaggatataaaatcaatgtgcaaaagtagctagcattcccatgcacaaacaacaggcaagcagggagacaaatcatgaatgaactttcattcacatttgctacaaagagaaaaaaatacctaggaatacagctaagaaagaaagtgaaggacctcttcaaggagaaccacaaacaactgctcagagaaatcagagtggacacaaaacagatggagaaatattccatgctcatggagaggaagaatcagtatcatgaatatgggcatatggccctaagtaattcatagattcaatgctattcccattgaactactgacattcttcagagaattagaaaaataaaaacttttaaagttcatatggaaccaaaaaagagcccaaatagccaagccaaccttaagaaaaaaaaaaaaaaagctggaagtgtcactctacctaacttcaaactatactagaagagtacagtaacaaaaacagcatggtactggtatagaaacagacacatagacaaatgaaacaaagtagagaacctagaaataaagccaaaaacctacaacaacctgatctttgacaaagttaacaaaaacaaggaattagggaaaggtgtccctattcaaaaaatggtgctaggagaactggctagccatatgcagagaatttaaactggaacccttcttaacaccatgtacaaaaattaactcaagatggattaaagacttaaatgtacaacccaaaactataaaacccttagaagaaaaaatctagataataccattcaggatataggcatgagaaaagactttatgacagaaaggcaaaaagctatagcaacaaaagcaaaaattgactaatggggtctaattaaactaaagagcttctgcggagccaaagaaactatcatcagagcagacaacctagagaatgggagaaaaattatgcaacctatccatctcacaaatgtctaatatccagaatctaggaggaatttaacaaaatttacaagagaaaaaaaaaaggccccattaaaaaagggtcaaagaacatgaacagacatatctcaaaagaggacatacatgtgcccaacaaacatgaaaagctcaacatcactgataactgcataaatacaaatcaaaaccataatgagataccatctcacacaaattataatggctattaataaaaagtaaaaaaaaaaaaaacagatgctggcgaggttgtggagaaaagggaacacttttacactgttggtgggagtgtaaattatttcaagcattgaggaagagagtgtggagattcctcaaagacctagaagcagaactaccatttgacccagcaataccattacacccaaaggaatataaataattctattttaaaaatacatgtatacaaatgttcattgcagcactatttacaatagcaacatcatgtaatcaatctacatgcccatcaatgatacactggataaaggaaatgtggtacacatacaccatggaacactatgaagccataaaatgtaatgagatgatgtcccttgcagggacatggttggaatttgaagccattactcccagcaaactaatgcaggaacagaaaaccaaacaccgcctattattattctaacttattagcagaagcagatcaatgagaacacatggacacatcaggaagaacaacacacactggacacctgtttcatggcatgggggaggggaaggagagcatcaggaagaatagctgcggatgctgggcttggtacctgggtgatgagatgatctgtgcagtaaaccacagtggtacgcatttatgtatgtaagagacctgcatactctgcacatggacccctaaacttaaaataaaagttgaaaaataaactttatcacatatggacccctgaacttaaaataaaacttgaaaaaaaaatgtgtttctggtggattctctatgttagacccaaactgaggatcttgaagctctcgctgggggaatcggggatgggggcacactggggagccgctgccaaggccaaccaccctccctacaagccacctcccttcccggccagtatggaaaggagaaggggtatgtgaacagctgtggaggtcagaatctcgggaactgaatcaggccccagcccatgccccccagcccagccctcaggattgttagatggaacaaggctccatcatcacccaggcatggagggaagatgccctggtccttaccaagcaaggcctggtttccaaagtcctctccgaagaggcctcatgtttgccacatcttaaaagtcccctttctgctgttcttgcacccagcatgttggacagtcaagttcccccgctgagcaatccacacataaggagggagtcaacaccattgctatgtcggatcagctccagcgtctccaatatcagttttatcagatcccaggaacctgcctgctcccagaggtgacagagaaaaatcaaggaaggatctgtatggtcactgacctggatgaaacccttgtgcatagctcctttaagccaatcagcaatgctgactgcctagtgcctgtagagcttgaggggaccatgcaccagatccatgtgctcatgaggccttatatggatgagttcctgacatgaatggaggaaatgtttaaatgtgttttcgtcattgctctcttcttcccagcctgaacaagtaggcagatcctgtgacgggtgagctggacgggtatgggatggtctggggctgcctgtcccatgagtcatgtttgtttcaccagggctgctatgtcaaggacgtcagccatctggggagggacctgaggaaaactcatcctggacaactcgcctgcttcttacatcttccacacagagaatgcagtgcctgtgcagtcctggtttgataacattccagacagcagctgctgcacctgatatcattatttgaggagatgagtggaggagcagagggtgtctacactagccttgggcagcagtgggcccttaaccttccctgcttcccagcaatggccatcacagtaggggattttcccacactgtgcctttatgaacagcctgaaagagtgaaggctggaacacctacccacatgggcctggaaacagtgagaagtgattgaaaagagctttaggacagcttagatgcccagtgggtgaatgccagaccaaggatacccagagctacctgccatcaagttgttgggttcccgagatgggggtgtgagagaaagaaagacagcatgtgtgttttgctatgaactgtggccccaagtatatagtgtttcagtagaggagaagctgaaggacaaagactcttcccaagctagcttgtctcctctcctgtcaccctatgagcccctgagatccatagggatgaagagtattgaaggctccgttgcaaacctggtctttcttcagtgctgcaaggcctatgccaaggagaaaggaaaggtatgcctttgggtgttccaggcacacatctttctgaaatatttctccagccagttgttgcagacaaaagacgacatttctgggaagatggggacttatgtccagacgagtacccaaactatcaggtcttctggcccaaaggctatttttacttacctctagccaagtgcctgggatggatcctttctgcgtctcaccaaggctcaccacttagccatagcctcaaacccgtggggaaggaaggtctccccgccctgcaagaggacaaataactgatttttgttcatttgactctgttttaaaattctctttaaaaaaaaaaaaaacaaaaaaaagaaaaagaaagcatatctgaaacttaaaaaaaaaaacaaggaaaaaagatgaaaaaaatgacatacttacataggtgaaaaacacatagatatatctataagcaacaaacacagctaattcaaatataaattaaatatcacattgtcataatgtgtaccgagttaaaaaattatcattcaactcatgatatcaagctttaaaagcaaaaatacaattaactgctctgagaaaacatacccccccagaaaagaaacacaacaacacagaactgaaaataagaagagagattttaatgcataaaatcctgaatacaacataaatatacaatgaaaaataagccctttttgtttttttttgagacagtctcaccctgtcgcccaggctggagtgcagtggtgccatctcggctcactgcaagctccgcctactgggttcacgccattctcctgcctcagcctctcgagtagctgggaatacaggcacccgccactatgcccggctaattttttctatatttagtagagactgggtttcaccgtgttagccaggatggtcttgatctcctgacctcgtgatccacccaccttggcctcccaaagtgctgggattacaggcatgagccaccgtgccgggctgaaaaataaccctttagatatctacagctttaaactgtgtgcagtcatgaaaagcagacattagaagtcattggcatttaataaattgcagtaaaattatacagtaaatacattacaatcattaataataggctttaatgagaagaatttaataaataatcattaaaaagacagcagaattttattctgttctcaatatgttgctgctcttcttatcaaatactataataaaactatatgactataatatagatttcaggagctaaaaaaagccttatattttcaaataaaagaacaatataaattttgcaaaatacaatgagcattactgaagtataaagtaaatatttggaattaaaatatatggtcatttagatacagactaaaaaagaatagaaatcttaatgattcctttctgcctacagtgagcttaaaattacaaccaaaaattttaataaatatgtagcacctacaagaaattttattaacagcttacataatgtgtaaatttgagcaatttattttagaacttttgaatctgaaaatcacctgcttgacattcatttgagaaagtgaaacataaaggagagtaacataagcaagacgacagaatgggaggttctgcatccacatcccccacgacataatgcagctgccacagcaaacataagtgcattcatgaaagccttggaatccagttcagagtttgtgacacccagctggaggcaaagaccaaggaagacatctttagagggtaagcacttgaccaagtggcaagcttgccaatcatggtcctcgcttcaaaacagaatactgccacatcttactgtagacttggctataactcatttgaccttggtcctgacactgcaacagtctgtggaaaacacaagagaattcatactcacctgagacttagatgacaggcctgcagaacttggttctctctatagtccctgaatcaggcaaaacacaccttctttccttctccagccatggtctggaagaaatcttcacattgatatgatgaaatgctaactaacaatatgaaaaatactaaagtataaatgtcactaaaatggtaaatacatactgaatttcagaatactataaattgttatcatcttaaactagactattaaaatacaagatgttttacataagtctcatgataaccagtaggaaaaaaaaatagtaaagaaaaagagaaagtaattaaagcatacacaaacaacaaaaattacacattggatatggtgtctcctgcttataattccaacactttgggaggccaaggtggaagaatcaaatctccttgggtgttgtggtacatgtctgcagtccaagctacttgggtggctaaggtgggacgattatttgagcccaggaggttaaggctacagtgagctgtgatatgccactgcacttcagtctgagcaagaaagcataactttgtctcaacaaaaatgaacaataccacaggaaagacagaaccagaaaaaaaagaagcaaacttaaaatggacagaaaactacaaatgtacaatagtaactgcttacctatcactaccttacaaataaaaagattaaagtatctactaaacagatactgctgtacactgaatgtcatctccaaaatttaggataaaatttaatagccaacatgttagaattaacaggtggaacctttaaaaattaattaagctataagcactctgccctcatgaatggattaacgttcttattatgggaatgggctaattataacaagaatggatctgttatatattaaaaaaaaaaagctctctctccctcacatctttgtgtatgttattatccagcaactagaccttcaacatataccagtataatgttgttttggcttcccagcctccagaatcatgagtcaaataaaattctattctttattaattaccagtgtgtgatattctgttatagcagccaaaagagactaaagcagacagagtggataaattaatcttttaaacctcataatatgctgcttacaagagactcaattatgaattaagagcataggctaaaagtgaaaggatagaaaatgatattccatgcaaataataaccaaaggagtgaaatggtaatgcttaaattagacaaaatagactttctagcaatgtctctcacaagaatgaaatgagtttaccatacaataatagaggttaatttctcaagagaatatagctttatatatttatgcacccaaaagggaggcttctaaatataaaaagcaaatattgccagaactgtagggagaagtagaaagaaacccaataatagaaaactttaacgaaatgtataataaaggacatatagttaacagcattgtaaattggcaagggaaagctggtctcatgtgttgcgtttgagaatgcagcaaagaaagtgggaactgataattttactgcaagcctgagttaggatgaaaaacagggtggtcgattagaggttccacttgccatacattaaaaaaacacaggagaaaaccagtcctcctctggagtgttaaaataattaaagatcagaaaattagtctaaagtggctctagtgccctgtgttcataggtaaaaaacaaaaaacaaacaaaaaaaaatctaaaacctaactcaaatatatttcctataaaacactatcttagcctgaagcaaaatgcaggtttaacccatgacaaacatgcaattaacctctgaatatgtaaccaggacatttccatctggatagttcaaataaggctaccatataactggaaccaattcttgaatttgggttgctttctcatgcatcttatgaaagcctttcctttatgcccctctggtggaccagaaatcatggctgggtgctttccatttcaccaatcactctttgttcagataaactgatgaaccttttaacatagactcccgttaatttttaacacgagagactgtggaccccacgggccgcagctcctcccacgcaaacacccactcgcggtttttccctgatgacccatctggcctccctgaacaatttgggaaatactcatggctgtgggcgcagagcagggcgctgcccagggacaggaccggatgggccggacgggacgtgggggtcctcgctgctggcccagcggccatcttgcagccacaggggactgagggccaagctgcgggagactcggagctaaccgtggggaggccggtcctgccggtttcacagtctgttctcccctctcgggatggcgaaccccgtatactcaccatttcccagcttccaggatgtcctggcaccttaactatgcgtccccaaggacctacagatcgcagggcaacaggggctgtgacagagtagcccagggctctcaaggtgcaggaggcgaaagaggagacagatcccaagctcctgtgccagcaccagcgagagacacagatcccgccaaatgcaggaagccacgccctcctttcctctcctctgccaccgcgcgcctgattgggcggttcccacatcagtgtcaatgactggataaaactccaggacgcacccaccctcgcctgactcctgcccttacccccactccccctcagacttagtgcacttttgttagtttgtttttaagttctggaatacatgtgcagaacgtgcaggtttgttacatagttttacatgtgccatggtggtttgctgcacctatcaacctgccatctaggttttaagccccatatgcattaggtatttgtcctaattttctccctccccttgacctcaaccccttaacaggccttagtgtgtgatctttggctccaggtgtccatgtgttctcatttttcaactcccacatatgagtgagaacatatggtgtttgctttcctgttcccgtgttagtttgctgaggttaatggttcccagcttcatccacgtccctgcaaaggacatgaactcattctttttatggctgcatattatttcatggtgtatatgtgccacattttctttttccaatctatcaatgatgggcattagggttggttccaagtctttgctattgcaaacagtggtgcaatagacatatgagtgcatgtgtctttatgctagaatgatttatattcctttgggtatatacccagtaatgagattgctggatcaaatggtatttctggttctagatccttgaggaatcaccacactgtcttccataatggttgaactaatttacactccctccagcagtgtaaaagtgtttctattcctccacagcctcaccagcatctgttgtttcctaactttttaataactgccattcaacatggtgtgagaaggtatcccattgtggttttgatttgcatttctctagtctccagtgatgatgagcttttctcttttttgtgtttgttgaccacataaaggtccccttcttcttcttcttcttcttcttcttcttcttcttcttcttcttcttcttcttcttcttcttcttttcttcttcttcttcttcttcttcttcttcttctccttctccttcttctttttctatttattttacttattattattatttttaagatggagtcttgctctgtcacccaggctggagtgcagtggaaggatctcggctcactgcaacatctgccacccaggttcaagtgattctcctgccttagcctccccagaagctgggattacaggtcacccgccaacacatcctactaattttttgtgtttttagtagaaatgcggtgtcgccatgcggcccaggctggtcttgaacacctgacctcatgatccacctgcctccacggctgaaagtgctgggattacagacttgatcaaccgcgcccagccaaatatcttcttttgaaaagagtctgtttatattctgtgcccactttttgatggtttttttttgtgtgtgtgtgaatttgtttaagttctttgtagattctggatattagacctctgacacatggatagagtgcaaaaattttctttcactctgtaggttgcctggtcactctggtgatagcttcttttgctgtgcagaagctcgttagtttagttagatctcatttgtcaattttagcttttgttgtgattgcttttggtattttattcatgaagtctttgctcatgcctatgtcctgaatggtattgcctaggttttcttctagggtttttatggtttggtgttttacatttaagactttaatccatcttaagataatgtttgcataaggtgtaaggaaggggtacaatttctgttttctgaatgtggctagccagttctttcagcaccatttggtaagtaggaaatctttccccattgcttgtttttgtcaggtttgtcggagatcagatggttgtagatgtgtgatgttatttctgaggcctctgttctgttccatttgtctatatatctgttttggtatcagtactgtgctgttttggttactgtagccttgtagtatagtttgaagtcgggtagcaggatgcctcaagctttgttgtttttgcttaggattgttttgggttgacaggcaaacaggctcctatatttggggtcacgtgcccagagtatcacagctaattcagacgtgagctgagacttgaaatgcacgtgctctttcccttacctgggtctgttgtataatgcatcttagcagctatgtaacagtacgaattagaatatttagacatctttttagcaactttttaacctgcatttttgtaacgcggtaaagaccttcatcccatccctgagcccctctctcacaacactgcaccccactgctgaccacactgttgtgtgaccattaggaatcaggggggcagcgggggctggaaataaataagaaaggattatgtttcccaaatttgctcaccttagaaagtctcctcaaccattctgtgtgaggtgatttttccaaggtaattgtgccctgactgcgctggatgtcagtgtgtcttgtctttttgaaaatcactggattactctcatgaacggggtatttctctttctatttgaaaatggtcaactgtcctctgcaggtgtcctgacttgctagtttagaccctgaaggtagcggtgagaaaatatttgggccacatcagaatacctattctcagctggaggatatatagaaatttcttaataatatctaaccattttctcaataaccattatatttaacattgatagcttggagggcagggaaggacacagatgacacaatcttcaaagtttaatttagttataaggttttttttttgttcttgcttagttttgcttagtttttggatacaaggtcttgctctggtgcccaggctggagggcagtggcataatgataactcataatttggttgtaacggttctttaaaatatatttttgctgagagtgctagctcatacctgtaatctaaacactttgggtggccaaggtgggatgatcgcttgatcccaggagttcaagacgagtctgagcaacataagtaggctcagtctctagaaaaatatttaaaaattgtctgggtgtagctttgcatgcctgtagtcccagctacttgagaggctgatttgaaagcatcactggagcctaagaatttgaagatgcagtgacccatgattcagccactgcattgacagagtgagatatgtgtgtgtctgtctgtgtgtgtgtataaagaatttgtatgtgaaaaaaattcaagcacaggagaaaagtgaaagcccatggtgggggatgtggagaaaggtcactgtggctccagcaactcagtgagacttggttttccatcttgaagaattgcccatccacactgacaccatagcctaacatatgccagttctcacactacacctgctgggataccagtatgtagccttttgaaaaaaataaaatctttcacctaagagaaggacaagagaaaacgagggtttcacatctaaagccttcattttctttatgaatcaacagccacttgtcatttcaattgtccagaggcgactgacagcactaatacacttaatgaatcaaccaggaaaaatgggcctctcaggtgaggaggaggcacaatcgtcacaaaacccaatccgttctcagctttgcatggtgctcgcatctcaagaagtggtgttagccatgtgaaccgtgttcactggacaaggccagaggaaagaatatgtagtacaacacaactatggggctgcaaatcaaactggtagtgagagcatgcatgaggcttcagtggccgagacactggtggctacccttcggtgtcacttaaatctttgaggtgaaggacatctttttcccaactggctcagagaaactaatcaacattaaaattgagatttgtttttcttttcaaaatttctaagacatagaggactctctaacactccaaaagacattcagctatacatgcagctgaggacctgcctgctctgtagagggatggcagagcagcagccaccagctttagtagctttaagctcctcttctcataggaacaggccacccccacacaacccccctaacttcataggctctggctgtcaggtgcacctgggggactgtcttcctcccatctcattagctctcgaagacagttcagctcaatgtaaaacctaccttaggatggtgagttgtaggctctcctctattctcccagcgcagtgtgacttctggagagtgcttctccatcctcttacctcagatgatgtgaaaagagccggttcccgggcagttagatgttcagtgacataacaggcccagcatgcgcagggcctggccccacaacctggcacctctcccttacctggccttcaggctggacttttctcttctgccacaaatgtcaggtgatgatcacctctgccacactctcatgagcttggtaagtatcaggggtgtaaaccccaacagatttcctgtgactctaccctcttaccacccactcaagtgacattataagcataattttacatttgatattatttatgcgtaattttttttataacatttctgacaacagcccacacaacgaaatgagtctgggttacagaacacacgggcgaggctggggtagcaggcttcaattactttattccaatgtgaaatgaagattgatgatttaaaaacaagacaaagttgtttatcagctgtggggtggctacacttgctagctcatgctcactttctttgaaacaaggtatctgtacagaccatactcataagtagctcttcacaaaaccccagacagaagtcccagtcagacacagctccctcaggctcacagggcagcaacctcctcctccatgttaggctctgacagcaggcaagggaagaagcacaggcagcaggggacagggagatgtcccggactgtagggatccccaaatgccccagagctattatctgtagaagggtgcacgcaggtctcactctgacagtgcagtggctgaatcatgggtcactgcagcctcaaactcttagcctccagtgatgctttcacctcagcctctcaagtagctgtatggcaaaaagcctcctatttttttacttaaaacctggacttcaagccaggttggacctggggatagtggcagcaaaagcagcagccaaatgtatacactccagatgtctacactcatgggcacaggcatattccactcttgctggagcacgagaggcctgagaggcacctgtttcccagttgctaactgatgcccacacaccccattcacgtgtcttcatttaggtctctgcatcgtgtattccctcagccagtgcaaacacatcttctggggggcatcattaattgcagcacctgcccctcttgttctgggagggagtcaagaggaatctggtcagctcctaatcccccaggacaaaggtgctgcccccttttcagcactcacatccagcaatgccatctctggatgggtttttcaaacacaagtagcatgaggtagcaagcatggtgtgacaggctcagggccatgggcagccggttgctggagaagcagcacagggcaggcacatctgtgggtggcaccatgacaagccaaggcagccacagcccctaatcccaacagctccagcccagttggcattcaaatcttcccagatagtattggggtacgcgatgcccatcactcgcccgctcattagcacggccttgttggttactcagagactaaggagagagagtgggggatgtagatccagggtgggcaccgccttgcagccagagtccacctgactgcaggccagcaagcaagcccaagcagctcagctctagtcacctctggctgtactttatgtgtatactttacacaaaggtagcaaacagaggtcaacattagctgttgtgacatgaaagtctatgcctcattaagaccttaaaatgctgttgtcttaagctctctttattccactaaaatttatacaaataaacacatgcaagctgaaactactataaaggaaatattaggattttttaaacccataaacagacatgaaaacagtcactgtttgattgcagagaaagtgagcttctaaagcagctgaccacaaaacagcctcaccaaaccccaggcaggccaggcagtctgaacactacaaggccacgtgatggtcacagaggatgacagctcccgtgagtattgcaaggcactgtgttagcttctcactcacagtctcagaataccctgtgaggggaggccccgtctcactagagcacaggaggttcctgagctcttcccagaaaatggtcatcaaacgatggagcagagggaagcccagacagaacaagtgagtccctagggtctccttaacctccctcagctcctccacatgggtccctgagggaaagtgagcagcctcctaacccccttgatagggttccagtcctgcaggtcggactctctcattttatgctaccatagggggtgacaatgcaaccccaggccccttatttgccatccctcaatgccaggccaggcccagagccctttgctaacacagcccaggggatgctcaaggcccacctcggcacagtcacctgtagtgtactgagatgagcaaggaggtgcaagtagacacaaatccccatgggcttggcctcagccatgttccacaggctcagggcctcgcagatgagctcacagccctccttcaggaagcctgcagatcacaccctcagggagcagtgctcagatgagcaggcaggccccacatcccccaccccatgacgctctgttccactttgcaggcttctgcattggccagtccccactgctttctggtgagatgtccgagttgaagtgaatgttgaaggccacacagctgatggagctcactgccttgcacatgttgtaaatcacctcctggcttcaagggtcagctgtggagacacagcttgatgggaggtaggcccactccaccatcagtggtgctgggttgccctgatctgcaccttccagatacttgctaagatatctgcatgcttctctaagggactgggtcacgagacacccctggcaaggaccagctggcagaacaggctggacactctccctcagcctccccagcagccccacctgtgctgtcatctgtgctgatgatctccgtggtaagattatgggaaacttttacagcaagttttcctttctcacttccctatcttaataacagcactgataacttttaagccctagcaagctgaaactgcaagacacatgatcttctgccttagaagggccatgtttgggcagtgggtgcccaggtgagagccccatggttgttagtggcagccgggagctggatgggcctgccccatagcctagtgaaaagtgggaccctctccttccagagcatggaagtctcagaggctggaaaaaggtgcctaagtggcctgccaaaaagcataaggctagaaggcctggaaagagccccaacagccttcaagctgcctgagagggctgggctcattccagctttctttgctttcatcctgttagcaagaaaacctgctcacagatggcaggcgggcctgaggctgccattccctcatcaggggctataggcacctttaatgtggctctttcttgaagcagctgctcaggccggttctcgaagagcagttccctcattatccacaggtccttcttccagccccgtgtctgcagagggactagggagggagacaagggctcagcctgtgccccacaacctgctttgagacatctcttttgttacttcctcacagacagcctgaaacttccaaatgaacagaccagaatggagcctccaggaaagtgtacagaattctgtctagtacccagaaggaagggggttcccagtgaaggcagggccaggctgcatgcacctcttcaaaaatgttctcctcatagtccacgctcaaggtgtacatcctctgtgtgcttgcagtccatggcagcctctgccttgggaacagtccagctgcacacctgcaatatggtggtgaccctcttgaatggatggttctgggccccattgcagacagcagatagggagatgctcagcccatcaagcccagagccctgccacaggcttctgtgaggcctccacctgctctgggttcttgccctgagaggctgccctgaagtcaaacagaagcaggtgggactctcttccacagctgctctctctcccactgacagctccctagagggtaactcagacagagaagatagaattctcaggcagaaggacaggagtttcggctgccgattcattccatacccccacatgacatgacacaaggcaggggctgtgggacaaaggcattgcctttccttctggcaagaggaatgccttaggaagcaggtctggtggggctagggttgagcgataggcttcaggccacaaggagtggatggacactgagcaagtatcctggttatctgtccacagatccagaacaagtggcatcccaggagcctgggaggggctggcagagacttactgtgtccagcaaaagccccatgtggatgcggtaatgctgcctgctggtccttgtctgtaattacaaacaggtacatgaggtccccatggatcttgcagctctcagggagtgggttccagctgctcatgttaggcacttttagtcactgaacgtgcttcaggaatggccaagtttgattaagccaggcgtcttgctgtgagaccctccacccaactgaggaccctcttccttgtcccccctgacagtttaccttccagttctggttctggagacacgatggcccttcttgggcccctgggagaatgtgctcagatgacacacagtcgacagggcccatttccaagccattcttccatttcccactgtttgaggggccgaggccggtgatcagcacagggccacccagggccagctgtctgcacctaaacgtcatgttggtctggatgtctcagggccagaactctccaggtaagatggcctggtcctcagcacctggcctccatgctcctttttcctctgttcaatcctggccccaatgcctcccgcaactctcaggtcaccattggagaagatgctcaggaagaacaaggagctgcagtcaaccctgctgaaggtggcatatgggtccaggctcttgagctggtcttcgacatggtacatgtggatgcaggctttgagcagtgtgagtagctctttccggaaggaggggaaaacggtgttaccagggtcctacaccctagaacgacccatctagcacagaaaacagtttgcaacgtgctattatgtgtgattttaattttgggctttaggctttcatttccaaattccacaataaacacataaggtggggttctgatttcaacacacacacacacacacacacacacacacacacacacacacacattctctctctcttcctctctcttagaatcttccagtgaattcacactgaaagccgaagtcctcccagaatcttgtgagaacctaaatgatctgaatagtttgtcattgcttttagggatctgggaaaatctctgcacatttctggagaccgctgttatgccatttttaataaatctgttgtgcttcaattcagaagtgtgtgaggggagttgtggaggaattggcatttgggttagaaattccaggaacaacagagacagatgacacctgttttctgcttcataatgtcaagttttatgaaggctaaaacctaattctacaaaaaaaattagactgaaaaactttataggcaaaaattatcttattaaataggaaaatctaattattttattttaaaattttcttttccttagtaggacctaatcatagaaatttaaacactgtatgccaacagcctctactgtaggatggtttattgtaagtactcattttacagatttcttacaaaaactttttccgtaagagaaattagaatattgttcaacatatattgaattcacaattattaccttatttctcacttattattttatgattctgttttctttaatatgaagattactatgactgtgttttcactttctgaattatcatgtgtcacatttttctgtaatttcagtttgagaagttgtaaaacagcatgctcaaatgtatatgttatgtatcaattatataattaattattaaaatatttggcttgtatgtttaattgactctaggcacaatattactattagcattttcttccagttttcccaacttttatttgactaatagtacaatttatttccagtttttattttatctgtcaatgttttatactgtatttacaatatttatattgttaccatatgtaaaaatgtaagacctttctattaaaggctagattacagccttacccttttgtgtaaggaaagaagcaatgcatcagtagcataatttaaaactttctctagtattacttaaatttttattccttaaaactttctcatcacatctctttttaataattataatatggtttctttgaaatgttgttgccctaattgtatccaagtaattcaaaatttatactttttatggattcaaaggaagagttgaaaattgtagttacctaggattctttttcagttggacactatgtttattcaggattttatagatcaaagtttctcttaattatgttttagaatttatgtttctgtattttttagagtaggctgtctcacagcagttaattgtgtttttactttctacctatttattatgattttgaattacattattcaagtaagaattcggggaaggtttcttttaagtttgttttgcaattttgcatttctgtgtttcatgttttagggtagggcaccttacatcagtttattgtttttagtttgaatttatataatataattttctatgacaatattcaaatctgtacagcttaagacagtgtgaggcaaaaaatatgaagcatccctatggtcttttgttaatataatgatttaattgtttgtttgcttgtataaatattgcccctattttgtttatgacttgtgtattttcttcttgtttgatggacaataattgattctgtctaagtgagtaatcatggaaattgtcttaatttcaacatctattgtttatattatcctagtgtgaaagaaagacttatgcgatttgaagataatttttcaaaaactttgtaactctctctcttcaggtgtctttacttatttattttttgacagactctcaccctgtcgccaaagtgcagtggcacaatcttggctcactgcaacctccacctcccaggttaaagcaattctccagctgctgcctcttgagtagctggcattaaaagtgtgcactaccacgcctggttaatttttgtgtttttcatagagctggggtttcaccatgttggccaggctggtcttgaactcatggcctcaagtaatctgcatgcctcagcctcccagagtgctgagattacaggcatgagccatctctcttggcccttgggtgtcatttttaatttcgattgtggtaaaaatacataacataaaatttagaatctttaatattttttcttatacagttcagtcatgttaatgtatttacattgctttgcaacatatttgtaaaacttttttcttttgcaaaactgaaactcaggacacatgaaatgacaactacccattttccttacaacctggctcctgataaaaatcattctattttctgtttctaagtttcaatactttagatattacatataagtagaatcatagagtatctgttttattgtgactaattttacttagcatcatgttctcaagatttctctttattgtggatggtacaagattttctgcctttaaaagctgagtaatattccattacttttgtattacaaattatatttatttattcattctatgaggaaagtttgtgttgctttcacctattggcctttgtgaataatgctgcaatgaatattggtatgcaaatagctatttgctcatatgtatgaggtttacatgtgtgctaccttctgttttattggaaaaattgtctgtctttatgctagaaacaaactgttttcattgctgttgctttgtaatgtgctttgaaatcagaaaattgaggccgctaacattgtttttttttaaaacatttttgggctctttatggtcgcttgacattccatataatttgttggttcctttttctatttcaaaaacattgctaatttaaaagggattgcattgaatctgtaactcgctttaggcatcatgagcattcttcataatatcaagtcttacaacccttaaacatgagcatgctcaaaagtgagttgtttaatttccatatatatgttgctatttttgttttcttctgttattcatttctagttttattccattttgatcagaaataatagtcactgaaaggctaaaccactctgggaagtgacccccattatagaacattacaaagagatgtgagggcaccacttctgccctgatgggctagagggatgtgttctctgagatgacacgttgcagacaaatgcagggaacaatataacccccttttcatgtaaactcttccttatttttctagagtattagtgatagtggtggctttgaagtcttggggaaggtctggcagtgccgtgaacctgcctgctacaggtgataccaggggggaaaaattaaaaccatacaaactgtagaaacatgaataaatacagcctagtgtaaagtaaaaacaacacaaaggccttctctgatatttctacaagaatgtaaaaagggactttacacttaaccaagctgcctttgggactagttaaggctagatttttgggaggcacatctttgggtcactcatggaaatcccctaagagagagcccagagaaattccatatttgggtctggatcctgggcccatcctggttttgtcagacccctgtctgtagagacccccatgtgcctgctctcaccgtaactcactgtatgccatgcttgggggtgtggtgaacctgccagttgtccaaggagatgggggacttgaacccatcaaatatctgctcaatgattttaatgaaactctacagagagtgttcccagcagtgaagcaggaaaaaaaaaaaaagaaaaaagaaaaaaaattaattatctcctttgtttttaccaccaggtgacatctccattagaaattctgtttcctagatcaggaacataggagtatctgcatagacccccagccaatgaggaaacccgaggacagcttaaggccttgggattcacatctgagtagacacacttggtccacaatgctcaactttttattccaccagccatgacctgggtatgaacatgacatagccgccagggttccaatgccttacagcctgcccctgtgagaaagagccccctcctttcctgctccccctgcaacacatggtaatggtagacagggtcgggttgcccagattagatgacacgggtggcctggcatggacggacctgacctgggcttcactgtgttacctctgtttgcctcttgttgaatggccagtggtatcaaggatgtgggctgagccaatatgtatatggtcagaaaagtctctcactttgaacctttctcaggcaacagcttaggaatatagcacacaatgagaacacagtactctctcaagcatctcccatgaaattagctagatagagggctctctctagaatgtgggtttctgtttcccaaagttctaaattctgttaggttctgtcacaagggaagtctgttaacttcttcaaggttttatcccctgagcccttttcctccataaatctatgcaaagtccctactgggctgctgattgctcaccctcatctcccatgtcaactcttttcctgtaaacagttatgcaaacacaattatgcctcttactccccaaaaagatctaaatacagccagggccccaggtttgagagaacagagttggattaaaatcttcttttccttttcatttctgtgaccatatgaaaatgactgtgtgcttcagttctccccagccctgaagtatgcataatgggattaggctagcatcaacttccagaaagagtcattggcgatatatgagatagaatgaatcaaaatcagttggatgtagttgctcttgcctgtaatcttagcagattggtagaccaagatgggtggaacacttaaggccaggggtttgaaaccagccatggccagcatggcaaaaacccttctccactaaaaatgcaaaaattagccagatgtgttgatgcttgcctgtaatcccagccactcaggaggctgaggtgtaagaatcacctgagccaaggaagcagagattacattgagccttgatcatgcctctgcactccagcctgggtgacatagcgagactgtgtctcaaaaaaatatatatactatgtatatataatttatatttatatattatatataatatataaacttatacatatacacctttatgtataaaagatatatatttcatatatctgtatacataaaagatatatattttatatatatggccttatttttccattctacagcagaagaggttgaaatcaaaagaaaatcagatactgtattctggcattaaatattccagtgctgtgcattatatttggaatcacatgtatatgcttcatctcagcctatgtggtgggcacccccaacaaagtctcacaacaacactaagttgtgagtgactctgttatttaaaaacgcagctcaccgctcagtgcctcagaagccggtactataacaccgggtttccaacaaagacattggattccagctgaagcctctttccctgtgcttacttaaaggtagtaatattctcagaaaggtttaagaggtggcttcttgtttagcagggaattgctgaaaggaaaaatgtatggaaagtcactgggcatgaacagccatcttttcctgctacacacaggtcatgtgcaaatttggggacagttagtacaaaacatgtgatggaaatttgggctcttacatcagtgagcttatttcacacagactccagttgaccatattggttccaaccaattttagccactttttagaagtctcataagtggaataaatttcattctttcaacaagttctatcttttcttatctgtcattctgcaaactgaagaatttctgctagtcgttggttgaactctttggggacctggttctagtttctgtcaaagagaatacaacaaatgtgataggttatcacttctgacttagttcaggcttctataccaaaaaacatagactaggcaacttataaacaaaagactttagttctggaggctagaaatttgagattggcttccagcatggttgtggtctggtaaggactctcttctgagtttcgaactccagacttcaggttgtattctcatttagcagagagaaggacagacagccttctgcggtttcttttacaaagccagtaatctctaccacgagggcctcatgcttaggacttaattacctctgacctgctaaggccattaaactggggattaatgttctggaatgtgaatatggtggggaatcacatagtctactgcaacttccaaagttatatttccaaaacagctattattttcctcccacttgctctgtcctgtgtttcgtctctcaatctctctgtctccctttctctttttctgtgcatatgtctgtctatctctttcattttccatctctctattgtattcttcaagatgaggaagcgatctccagtgtcctaagatgctctaggcacagacccacatgatagagaactgaggaactgcccaggccaatcaacaggaagaaactggtgttctcagttcacactgaatcctgccaatttccatgaggcagattggaggctgatctctccccaaatccagcttcagttgaaatcacagccccagcctcataggggaccttgaggcagaggcacccaactaagctatatcgagattctgattcacaaaaattgtgagatagtatttgttgtcaaaatgtgctaaaattcagggcaatgttgtcagagagcggcaaatgactaatctcctctttcaggccccaggatacaccctcccctcttttcctttctttctcaggctgcctacagccacacttgtccctttataacctcctctgctaaactgacttgtgcctctgagtcttttcacaaagagtggcttttccctgacacactttccacacctgcgcagttgtcattctcgtcacaacataatgtcacctcagggaggcattcatgtctcctccaggcaacctctccccagccctccctcccaacattctactttatttccattataaaatgctcttttctttcgcatgtacttgctttagtgtttttgtcctgccgtcctcagactgtaggctccccgcggggatgcagggataacataatcgtttttggtaccacatggtgaacctaccaaggtagctgccacagggtgagtgctaggggaagagtcgctgagtaaaataacatggaaaatcacaaagtccttcctgctttcggtcacccaataatgtggagatcaagaatgataacaggagctgcaggccctcagcctgtctctcccacggctccagctactccagtcaagtccagcgggcacaagaaacacggggtctgcagccacctagagacctccgctagcactgtagtcccaggcagaagcatcacaaaacaggtacctgcactggggaattctcaaggcagtggctcttcagggacccctgggaaaaggagcagtatctgaaggctccaagggccataaaagtgacctcggaagcctcccttgattcctattttcctcagcctctttgagtgtgctgtgcactcattaaacattttaacagcattcggcgacattattttcttccacttccgaatgaggacctcaaggacagcccaaaaaactagtattttttctgggccccacactccagagcccagtgcattgtcacattgtgctttattccaagtcctcatccgcccaagtctctaggcctctctcttctctgaaggacctctagaaactgaaaagcctcttcccagagtctcaaagcacagtgatttaccaatgaaaagccaagggcggcagacacctatgagtatctagaatccttggtattattccttctcagtacccctatttatgagggagaaaacaaaggctttctttcccgtagcctgtctttatatcacacggggtggtgggtggagggcatagctcattttagttccaggtgcccacagaagtgggagtcacaaccccagtcctgtcctcttgaaacagctgggaaagtccccaggcttggaagaacccagggaacctggaggatccttcatcgcatgctgtcagctcctggtcatgtagctgggggagtggatgcctctgcctcatggcaaagctgcatctactgtttcttccccttttgtcacttctttggtttcctcttccctaacctcactttagaatctccactttagatctccaatttagaagcctgtgtgtgtgtgtgtgtgtgtgtgatgtgtttgtgtgtgcatgcctgcacgcctatgtgacaacattgaagagtagaaagcccaggtagaaagtagagcacagggttttccaggactcatgggctctcatttccaaagcaaacctgatgggtggggtgcatgcaaggcctaggaagctggatccctccctaatactctgtgctttgcccaatttgtgggatctggaccagtctttgcctttttgggaggtctcagtcttcctgttgtaaaataaagagttggctacaaaactgtatgagcacatgctcagtgaagacagggtgtcatgctcaataccacagagaatattgggatggggaaagtttgggcagacttaggtgtccatgcgtgctcaggcctctgaacagggccagtgcaggcaaacataaagcacagcacagccaggttttctttccagggctacaggatgaaacagtgcaccacaggatctgctcttgaggtcggtcccgcaagattttcccaccttcaaccagcaactgtttgatgaatttcatgtcctgtgaagcccatatccacccccattacagtgaggggcacagggcactagacctgtaaaataatgtcttttgcctttttttcttttcttttctttttcttttttttttttttaactgagtggatgtttcttctttctctttatctgttttgtttgttttttaactaatttttaagaggtctttacaggtcagctgtggtgcctcgcacctgtaatttcaacactttgggaggatgaggcaggtggattatttgaggtcaggagttcaaaaccagcctggcgaacctggtgaaaatccgtctctactaaacttacaaaaaaattagcggggaatggtggcccaagcctgtagccccagctactcaggaggctgagacagaagaattgctgaaacttgggaggcggaggttgcagtgagccgagattgcacgactgcactccagactgggtgacagagtgagtctctgtaaaaaaaaaaaaaaaaagagagagagagagggagagagagagtgctcttcatggaaacatgagcccctttgtaatttcatgtgttgaaaatatttattccaattttgcaatttcttttcttattgtggtgttctctttaagtttggtttagatgttattagtgtttctccccaaattgatttattgatttccattttcacaatacaatattttggcagaaatcttgtggaaactgtctaatcagtttaaaaatttaaatacatattaaaaaatcaaagaactgtaaaaactgtcctgaagaatgacaaagtttgtgagcttacaatgccatatattcagacttagattaaagctatagtaataaaagctatctatggtagtaatgcaaaaataggcacaaagaaaactagaaaaactcgagagtccaactcagactcacacatttagacattttgtatattacaaaacaggcacagaagagcagtggagagaagacagcatctcggtaattagccttgggtcatctggttatttatgtgagaaagaaataaacctatcttatattgttaacaaatttcgagacaagtggattttaaattttaaggtgaaaattgaaaacaatatttctagtagataacatagataagtatgtccatgactttggcacaggccaagatttcttgggacacaaaatgcataaattatcaagacaaaaatatgacaaattggactttattagaattaaaaccttctcttcataaaaaaaaaagcttcaggagagctgaaaggcaagaacaaagtggaaatcaacatttgtcatatattgatctggcaaaagctttttatctagattattaagctaaatcccatcacttaataaacaaagatgcatacattgaacaaaattggcaaagatatgactaggagttccacatacagaaccgaagggccaacaagtagatgaacatatccacattcttatgcatcagaacaatgcatatgaaaactacaattgaataccactatgcaatcattaacatttttgaaaactgacaaaattaagtattagtgatgatgtcaagcaactggaactttcttataccattctgtgtgcaaactgttataaccacattcaaaaccacttgagtagtaactccttacatacacgatgtacataagcacactctagaacccagcaactctgctactaggtatatacacccaatagaattgccagcatattttccaatgtagtaaagtgctcgaagtagcattatttggtacttttccaaactgaaaaaaactcaaatgtgcatcaataataaaataaataactaaaacagctacatattcctttataaggggacattatacagatataaaattaattggagacatattaaaatatacaaaaatctaacaaatacaatttaattagatttaaaagtcctatccagagcaatcggccaataaaaaagaaaaaggcatacaaatagaaaaagaaattgaattctctttctccatttgcaatatgagtcactacgtagagaatgctaaagcctctccaaaactacttttggggaaaacttgaaaagcctcctgaaacggataagcaagtaaagttttaggacacaaaaccaatgtacaaaaataagcagcatttctatgcatcaacaactttgaattcctgaacatcttctggttttattgcattttcaattttttccctccattaactatacattttttcttttttcagctaaactaatttattcttctgtataatttcaccttgttaataaaccccaggccaaaaagtgggaataaagtatttgtctgcatcctgtttcctcattttgaaaactagtctagacgaaacctatacttgttctagggagttggcatagacagcatttatttccgttctcagcagtgatgccagccagaaagagggagttccccattttcactttggttagacaggactctggatggttgaaggggaaaagtttcagactctaagggagccaaataggatattacaaagatttatgcatttactccgggagcaattattgtgttaaattttgtgcaaaacactgcgcaaacagcaattaaagtgaaaattattaaggcattacctttaccttgggaaactcacactagtcagattctccgaaccccagaacataacaacaacctagtaaaatcttgttcagagtgaagagagggtgggagcaggaaggtaaggttaaaaattaggctgggtgaatgagataattacccctagtcaagcagtggaagtatggatggctttgggatgggtgaagacaaaagaatctcagcagagggtgcagataaaaaaaggcagaaacacaggaggcttatgcaggaagaggaatgagtttgctggactggggagagtgacagtaaaaagcagaggataataggcatctctggtcatctagggactatagggtggattagttgggggttacagaatcagtgaggtactttttaacagtaggatgggtaaataagagctataatttggaataattatgtagcaatggtggttaggagcaatagaaactcaaagtattacataaatatgtttttttcttattctcccacacaagcctttcaccttccctcttaaactgagaacggagtggtttgctatgatgtttttaaattctcacaggcaagcattactctgtgctgccttttaataaaggctaattttaaccaaattaaagaagattgaatggattttcttgatcataatggttgagtacaacatctcttaccttctactagttttcagtataactgaagtaacagaatgtcaatactccatggaggggtgttcctcttgctaaggctccctcctctgggctaggccttctacaccatggctgtcctgctgtggctggagctggaatttggattgacctctgtgtgtcttcctagcacacaataggtgtccaattagcatgggcagaatcaagctcctccctctcaccatttatttctccatttgtcccttgttgggaatggagagtcctgccactgagttcagcccagggttgaagttcaaatctcagctgatacttggtggatgttgacttttttgagaagaacttgggagaataaaacattataaaggcgctggccaggcacggtgtctcatgcctgtattcctggcatattgattggctgaggagatagaattgcttgaggccaggaatttgataccagccttgtcaacatagtgagaccccatttatacaaaaaacttgaagcattaaaaacatttagcctggtgtgatagttccaaactgttgtctcagctatgctggacattgaggcagaggatcacttgagccaggagttctaggctacagggagctatgatcgtgctgctgcactccaaccagggcaactatgcaagatgtttcaaaaataaaatcttttattattcttcacccctatagtctctccagaacttgtgcactatgtagcagaaagaatcaaactccccaagagtttggttcttgcttatgatttggttttctgctgcttggctgccccctcatttccccattttgtataaataagaacccccaggtgaagtggagtttctccccagcagagggtctcaccaaggccccaggactggcactttaggtggaggcttgcctttcaacctctgaataataattgatactaaaattgagaagttttccagacaccagcttcctgaaaggagcacccagtcgagacaagatgaggtcagtagcgaaggtgacccaggctgagtgggccgtacattcctctacttttcccaaacttccctctgacatcctacaaactttctgtcttcccaggactttcttgccagggagtctaatgaagtaaaagctttaaaattgctttgattttaaaaataattttattggttcttaaaatgtactgttaaatattactgtttttcttcccccaggggctacgtgaacataagctcggttttcacactagcagcatttagaaatgtctcttctggaggaacactgatgctctcaatcacacgtggtaattctctcctccaggcacaaaatgcagtctcagcatctctgtatcaggagtcactgtctaagtctctccagagaaataagctacccaggccatccagctgctggtgagttgctttgtggtcatgaactgggtagatttcctcatctcatgctcattggccacattcaggattaatgattcaatgcttttgttgttccagaagctgtggtcagtggctatgcaggagtcagtctttcagtgctgatctttgctgagaaaataatagtattgttcaaacagtatataggatttgcactcaatatttaataatttagtgacaaaaatctcttaaatatacattatactgatataaaataagttactcatctattatcaaatttactcttttatttaatataactcttgggataacattttcttttatgcttccataaatatgcttcacatggatatatcacatattgtgtataatttcacacagtgttaatatagtttccatctatttagatgtttgcacatttattttatctcaatgtttgttctcaggaagagtgtttttctttataaactaaattttcagcaaattttaaatgcatttcactgacgtaattatacttacattgtatttgtgtattaagttacattttgtccttaaacctgaaaataacttttcaaatatatgtaattttaaatttacatgtttttccctcagaactttgaaaaccataacctattggattcttgatcttattcacatattgagaaatatgtttcttttcattgctttataattaatttgaattttatcttagatagctttacgtgattttctctattatggtattatgcttttaactattgtttttcttttgatcagaatgcctttaagctattataattaattattttaataattatatatttttattccctatttgacattcactccattttatttattcgaacttgcacttaaacaacatgacttattttagatttttatgtattttaatttttcatattgtttatttgttttatccctattgggacttctaaatattcacttcatcatatcttctaattcataatttctttttcaattatgtaatttttctatgcattctatcctttaaatttaaaatttttacctaattattttgataatataacttattttgatcttacttttaaacttttcctctaatatatttaaacattataactacttatattatttctacagtatatatacaattttgggattttttaagatgtaatggtacagctgtgtttttcttataattttgtttcttaataactttgatcttgatgacttttactttgtatattttaaaaagaatagtagacttcattttattataaatgactgacctcaattgatggggccattgaagattctgggtcgaggtattttattccagtgaaaagttatctgtaatgttaataatgcaccctttacagacacctgaaaatgattaagtctatatatttacctaaattgtcctgagtaaaacacatagtgtacatataaaccagaaactcatatgatgattggtgttaatttccaaatcaaccaaagaggagaaataccacctccactaactaacctatttttctaaacttttgaaaatgtaaggattctagctttagatagcatagtcagatccaagtactcctgcatctatgctgctgtgacattatattcaccaatcagacacgttaaattctaacaacctgtgcttccattattagcaattcccacaggtagcatcaacttccagcctaatttttattctacagctgtgcttcttcattctttcctgaaaaattatttgtggaggtacatgcctttgaagtttctcagcatatattgttatttgaggttgaaaagataagattatctaaatttttgccagaaactctcatacccacattatatctttgaaagcattggttatcacactgctgctgacatgtgcatgtaggagaagcatgtaaatgtcagcgctttgcagtctctaaggggctgaaataaacaataccggaaatcttggccactgaggctcacatgtagattttcattcccagtccaggcatctagattcaggggcaccttcctgagggccttttggttgaggccttcttcagaaacttttgttcagatccctgtttctggagaagaaatggaactttgataataatttttatagattcctattaatattcaattctctttaatcttgctcatacattctcctctacgctctcctgcccccttttccacaaaattgcgggcctgttttttatgagggtgccacctcggcagtgagacagtgccccatatttgtgctgatccatctgaccctttcctggtgcttttccatgaggaaaaaatggaacaatgaggagtcggtgcttgatctaatgttgcctgttgtttaacacaatcacagaaaggaagacaaaaaggcataactatttctttgatgtgggcctcttgctttaatttaaaactctgatattaagcaggttagctcttcccagctcagctcagctcttgaaatttcatggaagaaattctgtttttattggtctaaattttgtgtcttttatatagaaaaaaggtaataaaattgcatcttatatttaaaaattgaatgccttctgttttgccattttactgaagagaaaatttgtgtagcctattggcattattaacagtgaagctccaagtactaatattcagaaaaaataatgaatcaaaatccaactatttctcagtaccattttcttttttataaactttctattttattgtctgtaatttaaaaacttctgtggaaaagagtttaaaattttcaaagttaatacaaaattatttttagagtttctttttgcataatgtttgtcgtaagtagctaatattaataaattgtaatcatcaattcttatctaagctgcacgttaaaaaatatgttaatatttgctgctgcctaaaatataatacatatttacataatctaatttactaaaaatagtaataaacacatataaataatcaacatacacaggtcattttttctatttcttacttatattttatgtttcatatttgtatcagcacactttatgtcctagtatcatatatggaaacgtgcctattttgcatattgttatattaaataataagacatatgcttagcttcccctaggttaaattttttacataattgttattaacgtaaataatccagaaattaaagtttttaaaaaaatttccagtgccctcactgtgcataatataattctattttttaaagtgttagtgctgtttgcattatataaaagaatattttagtgtatcaactaactacatacctgaaagcatggcttactttttcattagtatatacttttggttgtactcggctatttttctaaaagtgcttgcaaatcagttccaggccacagggctttgtcttcaacaaaataagaatatctcagagacccacagaaataactgtaccaagtactcctataaacaggcttctgatagaatgacttacataactttgaaacactatcagtggactaagttatttctctaattctagcagagaagcatatgtgcttacaagatagagtaaaacaagtatgaataaaacaggactaaatgaactgacaaagaatgataataggttttgtttggaatgtgaacataaaacattcctgctattatttccttggtatctaaacatgagctaatgggagccgttgttacatgttgtacacccttaagaaggtttacagtttttcgtctcacctatattcgtagttgtctttatttgtggtttagaatctcagctcttttcatagctgcctggcactcatcttgtatgagctcctttgtgtttctgaagcctctggcatacaccgagggtgtgggtttgcctggaatgtagcatcaacctgtagagaacaggattttccatgacccagtcattgaataaacttgatatctgcttctgctgttgagaaaacattatttctccttcaggaatatccaccctcttcatcaagaacatcgtgtcattcttcagggtcacagaatgctctacagcctacttcctggtgtccaccaaggaggagattagttgcatctgaattcaaggaagattcgagagggctcacagctgcagaattccaatcactctcagtctgactgtgctgattttagaaagacacatggggatctgccacaaggaaggcactttgcagggaggcctcaaccccatggcacaccccttcaggagggctcttctccttgtaacagtcacttagccacttgtagaaaggcaactcttagaaaatttaaatggggaccaaaatactaaccctaaccagtttattatctcaaagaattggaaaaacaaagttttcgaatactacgggattagaagagtaaacaagatatgccttttctttggagctacatatatgtattaaaaatgggatgtacaaagaattttttatcacatggagaagtgcttatgagatgatataacattaaacaaattaatgaaaggcacacattaaaaagtataaccaaacttatacattagagctcaaaatttaaaatgtgtagaaaaatgattgagaggaaatatgccgaattataggaattgatgtgtttcttataggaagcaggatcctgtgagaaattaaattgctttattgattctcttgtaattttatagtttccaaaagttctacagagagtgtaatgtaggaccttagtcaggaataaacatctctttaaataagcagcagagaatttcaaaggaagtgtgtggtatgggtttatgtgtttctttcaagatctaatattttccacgtagtgcttcagaaaagataaggtaatttcaacaacttaaccccatcatcaagagggtgttacttaagtacattatgggaggtcatagataaacaaccagtcagcctctaagcatcagaaaatctgtgatgtccattggcctgtgagatggtctgcatttctttgaaggaaaaaagcaggttttaaaacactagaaccgaatcaaatccaaatttgaatagaaagattagaaaggcttatgcatgggaaaaagattcagggtattcaacggttaattctgactatttctgagtaatttaaatttacctataatttaaaaaaaaaattaaggtcaggtgtgttgactcaaacctgtaatcccagcattttgggaggccgaggtgggtgaatcacttgagaccaggagtttgcgaccagtatgggcaccatggcaaaacctcatatctactaaaaacacaaaaaatagccaattggtggtgtgtgcttgtagtcccagctacttgggaggctgacgcatgagaatcgcttgaacctagggggtggaggttgcaataacccaagatctcaccactgcactccagtctgggtgacagagcaagaccttgtttcaaaaaaaattttttttgtattttaattaggaatcaaataagataattaaatgtaaacttacacttaatttactttttaagcattttaagaattggtattctaattttgtgtcggtacattttaagaatcaataaaattatttttaaaatcaaagcaattttaaagcttttacttcattagactccctggcaagaaagccctgggaagatagaaagtttggaggatgtcagagggaagtttgggaaaagtagaggaatatatggagggcagaaggagtgaacattagggaaaccctcccctagctcagtcttcagatacgctggtggacttccccactcagcctgagtcaccttcgctactgacctcatcttgtcttctgactggatgctcctttcaggaagctggtgtctggaaaacttctcaattttagtatcaattattattcagaggctgaaaggcaagcctccacctaaagtgccagtcttggggccttggtgagaccctctgctggggagaaactccacttcactggggggttcttattttatacaaaatggggacatgacggggcagccaagcagcagaaaaccaaatcatgagcaagaaccaaactcttggggagtttgattctttctgctacatagtgcacaagttctggagagactataggggtgaagaataataaaagattttatttttgaatcatcttgcgtggttgcctgtttggagtgcagtagcgtgatcatagttcaccgcagcctagaactcctggctcaagtgatcctctgcctcaatatccagcatagctgagacaacagtttggaactatcacacctggctaaatgtttttaatgcttcaagttttttgtataaatggggtctcactatgttgacaaggctggtatcaaattcctggcctcaagcaattctatctcctcagccaatcaatatgccaggaatacaggcatgagacaccgtgcctggccagcgcctttataatgttttattctcccaagttcttctcaaaaaagtcaacatccaccaagtatcagctgagatttgaacttcaaccctgggctgaactcagtggcaggactctccattcccaacaagggacaaatggagaaataaatggtgagagggaggagcttgattctgcccatgctaattggacacctattgtgtgctaggaagacacacagaggtcaatccaaattccagctccagccacagcaggacagccatggtgtagaaggcctagcccagaggagggagccttagcaagcggaacacccctccatggagtattgacactctgttatttcagttatactgaaaactagtagaaggtatgagatattgcactcaacccttatgagcaagaaaatccattcaatcttctttaatttggttaaaactaacctttactaaaaggcagcaaacaataatgcttgtctgtgagaatttaaaaacatcatagcaaaccactccgttctcagtttaagaggaaaggcaaaacgcttgtgtgggagaataagaaaaaaaatatttatgtaatactttgagtttctattgctcctaaccaccattgctacataattattccaaattatagctcttatttacccatcctactgttaaaaagtacctcactgattctgtaacccccaactaatccaccctatagtccctagatgaccagagatgcctattatcctctgctttttactgtcactctccccagtccagcaaactcattcctcttcctgcataagcctcctgtgtttctgcctttttttatctgcaccctctgctgagattcttttgtcttcacccatcccaaagccatccatacttccactgcttgactaggggtaattatctcattcacccagcctaatttttaatcttaccttcctgctcccaccctctcttcactctgaacaagattttactaggttgttgttatgttctggggttcggagaatctgactagtgtgagtttcccaaggtaaaggtaatgccttaataattttcactttaattgctctttgcgcagtgttttgcacaaaatttaacacaataattgctcccagagtaaatgtataaatctttgcaatgtctgatttgactcccttagagtttggatcttttcccctacaaccatccagagtcctgtctaaccaaagtgaaaatgcggaactccctctttctggttggcatcactgctgagaacggaaataaatgctgtctatgccaactccctagaacaagtataggtttcatctagactagttttcaaaatgaggaaacaggatgcagacaaatactttattcccactttttggcctggggtttattaacaaggtgaaattatacagaagaataaattagtttagctgaaaaaagaaaaaatgtatagttaatggagggaaaaaattgaaaatgcaataaaaccagaagatgttcaggaattcaaagttgttgatgcatagaaatactactggtttttgtacattggttttgtgtcctaaaactttacttgcttatccatttcaggaggcttttcaagttttctccaaaaggagttttggaaagactttagcattgtctacgtagtgactcataatgcaaatggagaaagagaattcatttttttttctatttgtatgcctttttcttttctattggctgattgctgtggataggacttttaaatctaattaaattgtatttgttagatttttgtatattttaatatgtctccaattaattttatatctgtataatgtccccttataaaggaatatgtagctgttttatttagttattttattactgatgcacatttgagtttttttcagtttggaaaagtaccaaataatgctgcttagagcatttgtctgcattggaaaatatgctggcatttctattgggtgtatatacctagtagcagagttgctgggtcctagagtgtgcttatgtacatcgtgtatgtaaggagttactactcaagaggttttgaatgccgttataacagtttgcacacagaatggtataagaaagttccagttgcttgacatcatcactagtacttaattttgtcagttttcaaaaatgtgaatgattgcatagtggcattcaattgtagttttcatatgcattgttctgatgcataaggatgtggatatgttcatctacttgttggcccttcggttctgtatgtggaactcctagtcacatgtttgtcaattttgttcaatgtattgcatctttgtttattaattgatgggatttagttaaataaactagataaaaggcttttgccacatcaatatatgacaaatgttgatttccactttgttcttgcctttcagctctcctgaaggttttttttatgaagagaaggttttaattgtaataaagtccaatttgtcatatttttgtcttgagaattaatgcattttgtgtcccaagaaatctgggcctgtgccagtcatggacatatttatctatgttatctactagaaatattgctttcagctttgaccttaaaatttaaaatccacttttcattggaatttgttaataatataagataggagtgttttttctcacataaataactggttgactcaaggctatttaccgagaagactgtcttcactcctcttctgtgcctgttttgtaatatacaaaatgtccaaatgtgtgagtctgagttggactctcgagtttttctagttttctttgtgcctatttttgcattactaccatagatagcttttattactatagctttaatctaagtctgaatatatgtcattttaagctcacaaactttgttattcttcaggacagtttttacatttcttcgattttttatatgtatttaaattttttaaactgattagacagtttccacaagatttctgccaaaatattgtattgtgaaaatggaaatctatgaatcaatttagggagaagttacatagaaacaaagcaaaacaaaacactaataacatccaaaacaaacttaaagagaacaccacaataagaaaagaaattcccaaattggaataaatatttacaactcatgaaattacaaatgggctcgcatttccataaagggcactctctctctccctctctctctctcttttttttttttccacagagactcactctgtcaccctgtcttgagtgcagacgtgcaatctcggctcactgcaacctctgcctcccaagtttcagcaattcttctgtctcagcctcctgagtagctggggctacaggcttgtgccaccattcccggctaattttttgtaattttagtagagacggggtttcaccaggttggccaggctggtttttaactcctgacctcaaatgatccgcccgcctcagcctctcaagtgttgaaattacagatgtgaggcaccacagctgacctgtaaagacctcttaaaaattagttaaaaaacaaacaaaacagaaaaagagaaagaagaaacagccactcagttaaaagaaaaagataaagaaaaagaaaaagaaaagaaaagaaaaaaaggcaaaagacattattttacaggtctagtgccctgtgcccctcactgtaatgggggtggatatgggcttcacaggacatgaaattcatcaaacagttgctggttgaaggagggaaaatcttgcgggaccagcctccagaacagagcctgtggtgcactgtttcatcccgtagccctggtaagaaaacctggctgtgccgtgctttatgttcacctgcatttgccctgttcagaggcctgagctaccgtggacacaaaagtctgctcaaactctccccatcccaatattctatctggtattgagcatgacaccctgtcttcactgagcatgtgtttatgcagttttgtgaccacctatccattttacaacaggaagactgaggcccccaaaaaaggcaaagactggtccatatcccagaaattgggaagagcacagagtattagggagggatccagcttccaaggccttgcatgcaccccacccatcaggtttgctttggaaatgagtgctcttaagtcctggaaaaccctgtggtctactttctacctgggctttctacccttccttattctcacataggtgtgcagccatgaacacacaaacacaccacacacacacacacacacacacaggcttctaaggtggagatcatggaggtgaggttagagaagaggaaaccagagaagtgacaaaacgggaagaaatagaagaggcagctttgccatgaggcagaggcatccactcccccagctacatgaccaggagctgacagcatgtgatgaaggatcctccaggttccctgggttcttccaggcctggggatcttcccagctgtttcaagaggacaggacaggggttgtgactcccacctctatgggcacctggaactaaaatgagctatgccctcccccaaccaccccatgtgatataaagtgaggctacgggaaagaaaaccttcgttttctctctcataaataggggtactcaaaaggaataataccaagaattctagatactcataagtgtctgctccccttggctcttcattggtaactcactgtgctttgagactctgggaagaggcttttcaggttctagaggtccttcagagaagagagaggcctagagatgtgggcagatgaggacttggaataaagcagaatgtgacaatgcactgggctctggagtgtggggcccagaaaaaatactagatttttgggctgtccttgaggtcctcattcagaagtggaagaaaataatgtctctgaatgctgttaaagtgtttaatgagtgcacagcacactcaaagaggctgaggaaaataggaatcaagggaggtttccgaggttacttttatggcccttggagtcttcagatactgctccttttcccaggggtccttgaatagccactgccttgagaattccccaatgcaggtgcctgttttgtgatgcttccacctgggacttcagggctagtggaggcctctaggtggcggcagaccccgtgtttcttatgcccgctgggctttactggagcagctggagccgggggagagacaggctgaggtcctgcagctcctgttatcattcatgatctccacattattgggtggccaaaagtgggaagaagggctttgtgattttccatgttattttactcagcgactcttcccctagcactcaccatgtggcagctaccttggtaggttcaccttatggtaccaaaaatgattatgttatccctgcctccccgcggggagcccacagtctgaggacggcaggacaaaaacactaaagcaagtacatgtgaaagaaaagagcattttataatggaaataaagtagaatgttgggagggagggctggggagaggttgcctggaggggacatgaatgcctccctgaggtgacattatgttgtgaccagaatgacaacagagagccagtcctgcgcaggtgtgcaaagtgtgtcagggaaaagccactctttgtgaagagactcacaggcacaggtgagttcagcagaggaggttataacgggacaattgtggcggcaggcagcctgagaaagaaaggaaaagaggggagggaggatcctggggactgaaagaggagattagtcatttgcccctctctgacaaaatttccctgaattttagcacatgttgacaacaaatactatctcacaacttttgtgaaccagaatctcgatatagcttagttgggtgcctctgcctcaaggtctcttacgaggctggggctgtgatttcaactgaagctggatttgaggagagatcagccttctatctgcctcatggaaactggcacgattcagtgtgaactgagagcccgagttccttcctctcgattggcctgggcatctcctcagttctctatcatgtgggtctgtgcctagagcatcttaggacactgcagatcacttcctcatcttgaggattacaatacagagatgaaaaatgaaagagatagacagacatatgcagagaaaaagagagaaagggagacagagagattgagagaggacacacaggacagagcaagtaagaggaaaataatagctgttttagaaatataactttggaagttgcagaagactatgtgattccccaccatgttcacataccagaaccttaatccccagtgtaatggccttagcaggtcagaggtaattaagtccgaagcatgaggacctcatgatagcgattacgggctttgtaaaagaaaccgcagaaggctgtctctccctctctctgctaaatgagaaaacaacctgaagtctggagtttgaaactcagaagagagtccttaccagaccccaaccatgctggaagcccaatctcaaatttctggcctctagaactaatgttttttatttataagttgcctagtctatgttttttggtatagaagtctgaactaagtcagaagtgataacctatcacatttgttgttttccctttgacagaaactagaaccaggtccccaaagagttcatccaatgactaacagaaattcttcagtttgcagaatgacagataagaaaagatacaacttgttgaaagaatgaaatttattccacttatgagacttctaaaaagtggctaaaattggtcggaaccaatatggtcaactggagtctgtgtgaaataagctcactgatgtcagagcccaaatttccatcacatgttttgtactaactgtccccaaatttgcacatgtgatctgtgtgtagcaagaaaaaatagttgttcatgcccagtgattttccatacatttttcctttaagcaattccgtactaatccagaacctacctcctaaacctttctgagaatattactacctttaagtaagcacagggaaacagacttgagctggaatcccatctctctgttagaaacccggtgttatagtacctgcttctgaggcactgagaggtgagctgcgttttaaaataacagagtcactcacaacttagtgttgttgtgagactttgttgggggtgcccaccacataggctgagatgaggcatatacatatgattctaaatataatgcacagcactggaatatttaatgccagaagacagtatctgattttcttttaatttcaacctcttctgctgtggaatggaaaattaaggccatatatataaaatatatatcttttatgtataaagatacataaactatgtatcttttatatataaagatatatatgtataagtttatatattatatatagttatatataattgatatatatatagttatatataatatataaataaaaatatttatatacattatatatatatatattttttgagacacagtctcgctctgtcacccaggctggagtgcagtggcaggatcatggctcaatgtaatctctgcttcctgggctcaagtgattcttacacctcagcctcctgagtggctgggattacaggcatgcatcaacacatctggctaatttttggatttttcgtagagaagggtttttgccatgctggccatggctggtttcaaacccctggccttaagtgttccagctgccttggtctaccaatctgctaagattacagcaagagccactgcatccaaccgattttgattcattctatctcatatatcaccaaagactgtttttggaagttgatgttagcataatcccattatgcatacttcagggctggggagacctgaagcacacagtcattttcatatggtcacagaaatgaaaaggaaaagaagattttaacccaactctgttctctcaaacctggggccctggctgcatttagaactttttgggaattaagggacataattgtgtttgcataactgtttacaggtaaagagttgacatgggagaggagggtgagcaatcagcagcccagcagggactttgcgtagatttatggaggaaaagggctcaggggataaaaccttgaagaagttaacagacttcccttgtgacaaaacctaacagaatttagaactttgggaaccagaaacccacattctagagacagccctgtatctagctaacttcttgggagatgcttgagagggcactgtgttctcattgtgttatattcccaagctgttgcctgagaaaggctcaaagtgagagccttttctgacagtatacatactggctcagcctacatccttgataccactggccattcgacaagaggcacccacaggtaacacagtttagcccagggcaggtccgtccatgccaggccacctgtgtcatctaatctgggcaacccgaccctgcctaccattaccctgtgttgcaaggggagcaggaaaggagggggcttttcctcacaggggcaggttttaagacacaggaaccctggtgggtctgtcatgttcatacccaggtcacggttggtggaataaaaagttgtgagttgcggaccaagtacgtctactcagatgtgaatcccaaggccttaagctgtcctcgggtttcctcattggctgggggtctatgcagatactcctatgttcctgatctaggaaacagaatttctaatgcagatgtcacctggtggtaaaaacaaagaagacaattaacttttttcgctgctgggaacactctttgtagagctgcattaaaatcagtgagcagatatttgatgggttcaagtcccccatctccttggacaactggcaggttcaccacaccccccaagcatggcatacaatgagttatgttgagagcaggcacatggggttctctacagagagggacctgacaaaaccaggatgggtccaggatccagacccaaatatggaatttctctgcgctttctcctaggggatttccatgagtgaccctcagatctaccccccaaaaatctagccttaactggtcccagtggcaacttggttaagtgtaaagtccctttttacattcttgtagaaatatcagagaaggcctttgtgttgtttttactttacactaggctgcatttattcatgttactacagtttgtatagttttaattattcccctctgatatcatctgtagcaagcaggttcatggtactgccagactttctccaagacttgaaagccaccactatcactaatactctacaaaaatagggaagagtttacatgaaaaaggggttatattgtttcctacatttgtctgcaatgtgtcatctaagagaactcatcccagtagcccatcagggcagaagtggtgccctcacatctctttgtaatgttctataatgggggtcacttcccagagtggtttagcctttcaatggctattatttctgatcaaaatggaataaaactagaaatgaataacagaagaaaacaaaaatagcaacatatatatggaaattaaacaactcacttttgagcatgctcatgtttaagggttgtaagacttaatattatgaataatgcttatgatgtctaaagcgagttacagattcaatgcaatcccttttaaattaagaactttttttttgaaatagaaaaaggaaccaacaaattatatggaatctcaagcgaccataaagagccccaaaatgtttaaaaaaaacaatgttagtgacctcaccttttctgatttcaaagcacattacaaagcaacagcaatgaaaacagtttgtttctggcataaacacagacaatttttccaataaaacagaaggtagcacacatgtaaacctcacacatatgagcaaatagctatttgcataccaatattcattgcagcattattcagaaatgccaataggtgaaagcaacacaaattttcctcatagaatgaataaataaataaaatttgtaatataaaactaatggaatattacttagcttttaaaggcagaaaatcttgtaccatccacaataaagaggaatcttgagaacataatgctaagtaaaattagtcacaataaaacagatactctatgattctacttatatgtaatatctaaagtattgaaacttagaaccagaaaatagaatgatttttatcaggagccaggtggtaaggacaatgggtagttgtcatttcatgtgtactgagttttagttttgcaaaagaaaaaattttacaaatatgttgcttaacaatgtaaatacacttaacatgactgaactgtataagaaaaaatattaaagattctaaattttatgttatgtatttttaccacaatcgaaattaaaaatgacacccaagggccaagagtgatcactcatgcctgtaatcgcagcactctgggaggctgaggcatgcaggttacttgaggccataagttcaagaccagcctggccaacatggtgaaaccccagcttcatgaaaaatacaaaaattagccaggcgcggtggtgcagaactttaatgccagctactcaagaggcagcagctggagaattgctttaacctgggaggtggaggttgcagtgatccaagattgtgccactgcactttggcaacagggtgagagtctgtcaaaagaaaaaaaaaaaaaaaaaaagacacccgaagggagagagttacaaagtttctgaaaaattatcttcaaatcacataaatctttccttcacactaagataatataaacaatagatgttgaaattaagacaatttccatgattactcacttagacagaataaattattggccatcaaataagaagaaaatataaaagtcataaacaaaataggggcaatatttatacaggcaaacaaacagttaaatcattgtattaacaaaagacatagggatggttcatatttgacttctgccccacactgtcttaatgcatacagagttgaatattgttatacaatattatattatacaaattaaaacttaaaacaataaactaatataaggtgccctaccctaaaacatgaaacacagaaatgtaaaattgcaaaacaaagttaaaataaacattaacccccaaattcttatttgaataatgaaattcaaaatcataataaataggtagaaagtaaaaacacaattaactgatgtgagacagcctactctaaaaaatacagaaacataaaattataaaacataattaagagaaactttaatccataaaatcctgaataaacatagtgtccaaatgaaaaagaatcccaggtaactacaatttttaactcttcctgtgaatctatgaaaagtatgaattttgaattatttggatacagttagggcaacaacatttcagagaaaacacattataattaatacaaagagctgtgatgagaaagttttaaggaataagcatttaagtaatactagagaaagttttaaattatgctactgatgcattgctgcttttcttacacaaaacgataaggctgtaatctagcttttaattgaaaagtcttacatttctaaatatggtaacaatataaatattgtaaatacagtataaaacattgacatataaaataaaaattggaaataaattgtactattagtcaaataaaagttgggaaaactggaagaagatgctaatagtaacattgtgcctagagtcaattaaacatacaagccaaatattttaataaattataaattatataatttatacataatatatacatttgagcatgctattttacaacttctgaaaggaaattacagacaaatgtgacacatgataattcagaaagtgaaaacacagtcatagtaatcttcatattaaagaagacagaatcataaaatactaagtgagaaataaagtaataattgtgaattcaatatatgttgaacaatattctaatttcccttacggaaaaagtttttgtaagaaatcagtaaaatgagtacatacaataaaccatcctacagtagaggctgttggcatatagagtttacatttctatgattaggtcctactaagaaaaaggaaattttaaaataaaatacttagattttcctatttaataagataatttttgcctataaagtttttcagtctaattttcttgtagaattaggttttagccatcgtaaaacttgacattatgaagcagaaaacaggtgtcatctgtctctggtgttcctggaatttctaacccaaatgccaattcctccacaactcccttcacacacttctgaattgaagcacaacagatttattaaaattggcataacagcggtctccagaaatgtgcagagattttcccagatccccaaaatcaatgacaaactattcagatcatttaggttctcacaagattctgggaggactttggctttcagtgtgaacgcactggaagattctaagagagagggagagagagagaatgtgtgtgtgttgaaatcagaaccccaccttatgtgtttattgtggaaattgaaaatgaaagcctaaagttgaaaattaaaatcacacatgatagcacgttgcaaactgttttctgtgctagatgggtcgttctagggtgtaggaccctggaaacaccgttttcccctccttccggaaagagctactcacactgctcaaagcctgcatccacatgtaccatgtcgaagaccagctcaagagcctggacccatatgccaccttcagcagggttgactgcagcttcttgttcttcctgagcatcttctccaatggtgacctgagagttgcgggaggcattggggccaggattgaacagaggaaaaaggagcacggaggccaggtgctgaggaccaggccatctcacctggagagttctggccctgagacatccagaccagcatgatgtttaggtgcagacagctggccctgggtggccctgtgctgatcaccggcctcagcccctcaaacagtgggaaatggaagaatggcttggaaatgggccctgtcgacagtgtgtcacctgagcacattctcccaggggcccaagaggggccatcgtgtctctagaaccagaactggaaggtgaaactgccagggggaacaaggaagagggtcctcagttgggtggagggtctcacagcaagacgcctggcttaatcaagcttggccattcctgaagcacgttcagtgactaaaagtgcctaccatgagcagctggaacacactctctgagagctgcaagatgcatggggacctcaagtacctgtttgtaattacagccaaggaccagcaggcagcattgctgcatccacatgggcttttgctggaaccagtaagtctctgccagcccctcccaggctcctgggatgccacttgttctgggtctgtggacagataaccaggacacttactcagtgaagcccatcgctcaaccccagccccaccataccctgtctcctatgccattcctcatcccagaaggaaaggcaatgcctttgtcccacagcccctgccttgtgtcatctcatgtgggggtatggaatgaacccgtcagcctaaactccagtccttctgcctgaggaatctgtccccgctgtcttagtcgccctctagggagctgtcagtgggataaagagcagccctggaagagaggcccaccttcttctgtttgacttcaggacagcctttcagggcaagaacccagagcagatggaggcctcacagaaggctgtggcagggctctcggcttggtgggctaagcatctccctctctgatgactgccatggggcccacaaccactcattcaagagggtcaccaccacattgcaggtgttcagctggacggttccccaggcagagcctgccatggactgcatacacacagaggatgcacaccttgaagttggacaatgaggagaacattcctgaagaggtgcatgcagcctggccctgccctcactgggaacccccttccatctgggtactagacagaattctgtgcacttttctggaggctccatgctggtctgttcatttggaagtttgatgctgtccgtgaggaagtaacaaaagagatatctcagagcaggttgtggggcacaggctgagagattttctccctccctagtccctctgcagacacggggctggaacaagaacctgtggataatgagggaacttctcttcgagaaccggcctgagcagctgcttcaagaaagagccacattaaagtgcctatagcccctgatgagggaatggtagcctcaggcccgcctgccatgtgtgagcaggttttcttgctatcaggatgaaagcaaagaaagctggaatgagcccagccctctcaggcaccttgaagactgttggggttccttccagcccttctagccttatgctttttggcaggccactcaggcacctttttccagcctctgagacttccatgctctggaaggagagggtcccacttttcactaggctatggggccaggcccatccagctcccggcttccactaacaaccatggggctctcacctgggcacacactgcccaaacatggaccttctaaggcagaagatcatgtgtcttgcagttccagctttctagggcttaaaagttatcagtgctgttattaagatagggaagtgagaaaggaaaacttgctgtaaaagtttcccataatcttaccacggagatcatcagcacagatgacagcacaggtagggctgctggggaggctgaaggagagtgtccagcctgttctgccagctggtccttgccaggggtgtctcgtgacccagtcccttagagaagcatgcagatatctcagcaagtatctggaaggtgcagatcagggcaacccagcactactgatggtggagtgggcctacctcccatcaagctgtgtctccacagctgacccttgtaaccaggaggtgttttacaacatgtgcaaggcagtgagctccatcagctgtgtggcattcaacactcacttcaactcggacatctcaccagaaagcagtggggactggccaatgcagaagcctgcaaagtggaacagagcgtcatggggtgggggatgtggggcctgcctgctcatctgagcactgctccctgagggtgtgatctgcaggcttcctgaaggagggctgtgagctcttctgcgaggccctgagcctgtggaacatagctgaggccaagcccatggggatttgtgtctacttgcacctccttgctcatctcagtacactacaggtgactgtgccgaggtgggccttgagcatcccctgggctgtgtcagcaaatggctctgggcctggcctggcattgagggatggcaaaaaaggagcctggggttgcattgtcatcccctatggtagcataaaatgagagagtccagacctgcaggactggaaccctaacaaaggggttaggagactgctcactttccctcaggaacccatgtggaggagctgagggaggttaaggagaccctagggactcacttgttctgtctgggcttccccctgctccatcgtttgatgaccattttctgggaagagctcaggaacctcctgtgctctagtgagacggggcctcccctcacagggtattctgagactgtgagtgagaagctaacacagtgccttgcaatactcatgggagctgtcatcctctgtgaccatcacgtggccttgtagtgttcagactgcctggcctgcctggggtttggtgaggctgttttgtggtcaggtgctttagaagctcactttctctgcaatcaaacagtgactgttttcatgtctgtttatgggtttaaaaaatcctaatatttcctttatagtagttcaccttgtatgtgtttatttgtataaattttattagagtaaagagagcttaagacaatagcattttaaggtcttaatgaggcatagactttcatgtcacaacagctaatgttgacctccttttgctgcctttgtgtaaattacacataaaaagtgcagccagaggtgactagagctgagctgcttgggcttgcttgctggcctgcagtcaggtggactctggctgtgaggcagtgcccaccctggatctacatcccccaccccctctccttagtccctgagtaaccaacaaggccgtgctaatgagagggcgagtgatgggcatcgggcacccccatattatccgggaagatttgaatgccatctgggctggagctgttgggattaggggctgaggctgtcttggcttgtcatggtgccacccacagatgtgcctgccctgtgctgcttctccagaagccggctgcccatggccctgagcctgtcacaccatgcttgctacctcatgctgcttgtgtttgaaaaacccatcccgagatgacgctgctggatgtaagtcctgaaaagggggcatcacctttgtcctgggggattaggagctgaccagattcctcttgactccctcccagaacaagtggggcaggtgctgcaattaatgttgccccctagaagatgtgtttgcactggctgagcaaatatacgatgcagagacctaaatgaagacacgtgaatggggtgtgtggacatcagttagtagctgggaaacaggtgcctctcaggcgtctcgtgttccagcaagtgtggaatatgcctgtgcccatgagtgtagacatctgaagtgtatacatttggctgctgcttttgctgccactattcccaggcccaacctggcttaaagtccaggttttaagtaaaaagtaggaggctttttgccatacagctacttgagaggctgaggtgaaagcatcactggagcctaagagattgaggctgcagtgacccatgattcagccactgcactgacacagtgagacctgcgtgtgcccttctacagagaatagctctggggcatttggggatccctacagtcccggaccctccctgtcccctgctgcctgtgctcctttccttgcctgctgtcagagcctaacatggaggcggttgccaccctgtgagcctgagggagctgtgtctgactggaacttctgtctgaggttttgcgaagtcttacttatgaatatggtctgtccagataccttgtttcaaaggaagtgagcatgagctagcaagtgtagccaccccacagctgataaacaactttgtcttgtttttaaatcatcaatcttcatttcacattggaataaagtaagtgaaacctgctacccgagcctcgcccgtgtgttctgtaacccagactcatgtggttgtgtgggctgttgtcagaaatgttataaaaaggttatgcataaattagatcaaatataaaattatgcttataatgtcacttgagtgggaggtaagagggtagagtcacaggaaatctgttggggtttacacccctgctacttaccaagctcatgagagtgtggcactggtgaccatcacctgacattggtgacagaagagaaaaggtcgaagtgaaggccaggtaggagagaggtgccaggctgtggggccaggccctgcgcatgctgggcctgttaggtcactgaacatctaactacccgggaaccagctcttttcacatcatttgaggtaagacgatgggggagcactctccagaagtcacactgcgctgggagaatggaggagagtctacataccgccatcttagggtaggttttagattgagctgaactgtcttggagagctaatgagatgggaggaagacagtcccccaggtgcacctaacagccagagcctatgaagttaggggggttgtgtgggggtggcctttccctataagaggaggagcttaaagctcttaaagctggtggctgctgctctgccatccctctacagagcagtcaagtcctcagctgcaagaatatctgaatgtcttttggagtgttagagtcctctgtgtcttagaaattttgaaaagaaaaacaaatctcaatattaatgttgattagtttctctgagccaattggggaaaataaacgtccttcacctcaaaggtttaagtgacaccgaagggtagccaccagtgtctcggccactgaagcctcatgcatgctctcactaccagtttgatttgcagccccatagttgtgttgtactaaatattctttcctctggccttgtccagtgaacacggttcacatggctaacaccacttcttgagatgcgagcaccatgcaaagctgagaacggattgggttttgtgaccattgtgcctcctcctcacctgagaggcccatttttcctggttgattcattaagtgtattggtgctgtcagtcgcctctggacaattgaaatgacaagtggctgttgattcataaagaaaatgaaggctttagatgtgaaaccctcgttttctcttgtccttctcttaggtgaaagattttatttttttcaaaaggctacatactggtatcccagcaggtgtagtgtgagaactggcatatgttaggctatggtgtcagtgtggatgggcaattcttcaagatggaaaaccaagtctcactgagttgctggagccacactgacctttctccacatcccccaccatgggctttcacttttatcctgtgcttgaatttttttcacatacaaattctttatacacacacacagacacacacacacatatctcactctgtcaatgcagtggctgaatcatgggtcactgcatcttcaaattcttaggctccagtgatgctttcaaatcagcctctcaagtagctgggactacaggcatgcaaagctacacccagacaatttttaaatatttttctagagactgagcctacttatgttgctcagactcgtcttgcactcctgggatcaaacgataatcccaccttgaccacccaaagtgtttagattacaggtgtgagctagcactctcagcaaaaatatattttaaagaaccgttacaaccaaattatgagttatcattatgccactgccctccaccctgggcaccagaacaagaccttgtatccaaaaactaagcaaaactaaacaagaacaaaaaaaaaaaaacttataaataaactttgaagattgtgtcatctgtgtccttccctgccctccaagctatcaatgttaaatataatggttattgagaaaatggttagatattattaagaaatttctatatatcttccagctgagaataggtattctgttgtggcccaaatattttctcaccgctaccttcagggtctaaactagcaaatcaggacacctgcagaggacagttggccgttttcaaatagaaagagaaatacccccgttcatgagagtaatccagtgattttcaaaaagacaagtcagactgacatgcagcgcagtcaggccacaattaccctggaataatcacttcacacagaatggttgaggagactttctaagatgagcaaatttgggcagcataatccttgcttatttattcccagcccccactgcccgcctgattcctaatggctaccctacaatgtggtcagcagtgggatgtagcgtggtgagagaggggctcagggacgggatgaaggtctttcctgcattatcaaaatgcaggttaaaaagttgttaaaaagatgtccaaatgttctaattcctactgttaaatagctgctaagatgcattatacaacagacccaggtaagggaaggagcatgtgcatttcaagtctcagctcacttcttaattagctgtgatactctgggcaggtgaccccaactatacgagcctgtgtgcctgtcaacccaaaacaatcctaagcaaaaacaccaaagcttggggcatcttgctacccgacttcaaactatactacaaggctgcagtaaccaaaacagcacagtactaataccaaaacagatatatagaccaatggaacagaacagaggcctcagtaataacatcacacatctacaaccatctgatctctaacaaacctgacaaaaacaagcaatggagaaagatttactacttaccaaatggtgctgaaagaactggctagccacattcagaaaacagaaactggaccccttctttacatcttatacaaacattatctcaagatggattaaagtcttaaatataaaacaccaaaccacaaaaaccctagaagaaaacctaggcaataccattcaggacataggcatgagcaaagacttcaggaataaaataccaaaagcaatcacaacaaaagctaaaattgacaaatgagatctaattaaactaacgagcttctgcacagcaaaagaatctatcatcagagtgaccaggcaacctacagaatgacagaaaatttttgcaatctatccatgtgtcagaggtctaatatccagaatctacaaggaacttaatttcacacacacacaaaaaaaaaacatcaaaaagtgagtaaagaatatgaacagactattctcaaaagaagacatttggctgggcgtggttgatcaagcctgtaatcccagcactttcagccatggaggcaggtggatcatgaggtcaggtgttcaagactagcctgggcaacatggtgaaaccatgtctctactaaaaacacaaaaaattagcatggtgttttggcgggtggctgtgattccagcttcttgggaggataaggcaggagaatcacttgaacctgggtggcagatgttgcagtgagctgagatcctgccactgcactccagcctgggtgacagagctagactccgtctttaaaataataataaataaaataaataaaaagaaaaggaagaaggagaagaagaagaggaagaagaagaagaagaagaagaagaagaagaagaagaagaagaagaagaagaagaagaagaagaagaagacatttatgtggtcaacaaacacacaaaaaggaaaaagaaaaaagctcatcatcactgatgattagagaaatgcaaatcaaaaccacaatgggataccatctcacaccatttggaatggcagttattaaaatgtcaggaacaacagatgctgatgaggctatggagaaatagaaacgcttttacactgctgggggcgggagtgtaaattacttcaaccattatggaagacagtgtggtgattccctaagtatctagaaccagaaataccatttgacccagcaatctcattactggttatatacccaaaggaatataaatcattctagcataaagacacatgcactcatatatctattgcagcactgtttacaataacaaagacttggaaccaacctaatgcccatcattgatagactggaaaaagaaaatgtggcacatatacaccatgaaataatattcagccataaaaagaatgagttcatgtcctttgcagggacgtgaatgacactggaaaccattctcttcagcaaactaacacgggaacaggaaacagaacaccatatgttctcactcatatgtgggagttgaacaatgagaacacatggacaccgggaacaaaacatcacacactggggcctgttagggtgttgaggtcaaggggagggagaaaattaggacaaatacctaatgcatatggggcttaaatcctagacgtcaggttgatagaagcagcaaaccaccatggcacatgtaaacctatgtaacaaacctgcacgttctgcacatgtattccagaacttaaagtaaaacaaactaacaaaaatgcactaaggctgagggggagtgggggtaggggcaggagtcaggcgggggtgggtgagtcctggagttttatccagtcattgacactgatgtgggaacagcccaatcaggcgcgcagttggagaggacaggagaggagggcgtggcttctggcgtttggcgggtctttgtctcttgctggcgctggcacaggaacttgggatccgtctcctctttcgcctcctccgctttgggagccccgggctactctttcacagcccctgttgccctgtgatctgtaggtccttggggacgcacagttaagatgacaggacatcctggaagctgggaaatggtgagtatacggggttcggcatcccgagaggggacagcaggctgtgaaaccggcaggaccggcccccacggttagctccgagtctcccgcagcttggccctcagtcccctgtggctgcaagatggccgctgggccagcatcgaggacccccacatccggcctggcccatccggtgctgtccctgggcagcgccctgctctgcgcccacagccatgagtatttcccagattgttcagggaggcctggtgggtcatcagggaaaaactgccactgggtgtttgcgtgggaggagctgcggcccgtggggtccccagtctctcttgttaaaaattaacgggagtctatgttaaaacgttaaccagtttatctgaacaaacagtgattggtgaaatggaaagcacccagccatgatttctggtccaccagaggggcataaaggaaaggctttcataagatgcatgagaaagcagcccaaattcaaaaattggttccagttatgtagtcaccttatttgaactatccagatggaaatgtcctggttacatattcagaggttaattgcatgtttgccattggttaaacgtgcattttgtttcaggctaagataatgctttataggaaatgtatttgagttaggttttagtttttgtttttttttttttaacctatgaacccaggacactagagccactttagtctaattttctgctctttaattattttaacactccagaggaggactggttttctcctgtgtttttttaatatatggcaagtggaacctctaatcgaccaccctgtttttcagcctaactcaggcttgtggtaaaattatcagttcccactttctttgctgcattctcaaatgcaacacaggagaacagctttcccttgcaaattcacaatgctgttaactatttgtcctttattatacatttcattaaagttttctattattggatttctttctacttctccctacagttctgcccatatttgctttttatatttagaagcctcccttttgggtgcataaatatatatagctatattcacttgacaaattaacctctattattattgtatggtaaactcatttcatgcttgtgagagacattgctagaaagtctattttgtctaatttaagcataactaccattgaactcctttggctattatttgcatggaatatcattttctatcctttcacttttagcctatgctcttaattcataattgagtctcttgtaagcagcatattacgaggtttaaaagtttcatttatccactctgtctgctttagtctcttttggctgttataacagaatatcacagactggtaattaataaagaacagaattttatttgactcatgattctggaggctgggaaggtaaaagaacatgttactggtatctgttgaaggtctagttgctggataataacatggccaaagatgtgagggagagacagcttttttttttttaatatataacagatccattcttgttaaaattagcccattcccataataagaacattaatccattcatgagggcagagtgcttatagcttaattaatttttaaaggttccacctcttaattctttcacattggccattttatcctaaattttggagatgacattcagtctacagaagtatctgtttagtagataatttaatctttttatttgtaaggtagtgataggtaagcagttactattgtacatttgtagttttctgtccattttaagtttgcttcttttttttctggttctgtctttcctgtggtattgttcatttttgttgagacaaagttatgctttcttgctcagactgaagttcagtggcatatcacagctcactgtagcctcaatctcctgggctcaagcaatcctccccccttagccacccaagtagcttggactacttggacatgtaccacaacacccaaggagcttatgattcttccaccttggcctccaaaagtgttggaattataagcaggagccactgtatccaatgtgtaatttttgttgtttgtgtatgctttaattactttctctttttctttactatgtttttttttcccccagtggttatcatgagacttatgtaaaacctcttgtattttaatagtctagtttaagatgataacaatttagagtattctgaatttcagtatgtatttaccatttttagtgacatttatactttagtatttttcatattgttagttagcatttcatcatatcaatgtgaagatttcttccagaccttggctggagaaggaaagaaggtgtgttttgcctgattcagggactatagagagaaccaagttctgcaggcctgtcacctaagtctcagatgagtatgaattcttttgtgtttttcacagatttttgcagtggcaggaccaagttcaaatgagtcatagccaagtttacagtaagatgtggtagtattctgttttgaaccgaggaccatgattggcaagcttgccacttggtcaagtgcttaccctctaaagatgtcttccttggtctttgcctccagctgggtgtcacaaactctgaactggattctaaggctttcatgaatgcacttatgtttcccgtggcagctgcattatgttgtgggggatgtgcatgccgaacctcccattctgtcgtcttgcttatgttactctcctttatgtttcactttctcaaatgaatgtcaagctggtgatttttagattcaaaaattctaaaataaattgctcaaatttccacattatgtaagctattaataaaatgtcttgtaggtgctacatatttattaaaatttttggttgtaattttaagctcactgcaggcagaaaggaatcattaacatttatattcttttttttagtctgtatctaaatgatggtatattttaattccagatatttactttatactgcagtaatgctcgtcatattttgcaaaatttatgttgttcttttatttggaaatataaggcttttttagctcttgaaatctatattatagtcatataattttattatgttttgtggtaagaagtgcagcaacatattgagaacataataaaattatcctgtatttttaatgattatttattaaattcctctcattagagcctgttattaatgattgtaatgtattttctgtataattttactgcaatttattaaattctaatgacttaaattgtctgcttttcatgagtgcacacagttgaatgctgtagatatctaaagaattatttttcggccggttgtggtggctcatgcctgtattcccagcaccttgggaggccaaggcgggtggatcacgaggtcaggagatcgagacaaccctgactaacatggtgaaaccccgtctctactaaatatacaaaaaattagccgggcatagtggcaggcgcctgtatccccagctactcaggaggctgaggcaggagaatggcgtgaactcagtggacagagtttgcagtgagccgagatcgcgccactgcactccagcctgggcaacagggcaagactctgtctcaaaaaaaaaaataaaaaaaaaaacggttattttccattgtaaatctatgttgtattcaggattttatgcacgaaaatctctcttcttattttcaagtccgtgttattgtgtttcttttcttgggagttatgttttctcagatcagttaaatgtatttttattttaaagcttgatatcatcagttgaaagataatttttagctcggtacactttatctcaatgtgatgtttaatatatgtgtgaattagctgtgtttgttgcttatagatatatctgtatgtttttcacttatgtaagtatgacatctttttccttgtttttttgtttttttcttttcagtttcagataggctttttttttttttaagagaattttaaaacagagtcgaaagaagagaaatcagttatttgtcctcttgcagggtggggagacaacttccttccccacaggtttgaggctatgcctaagtggtgagtcttgaggagatgcagaaaggatccatcccaggcacttggctggacttaagtaagcatagcctttaggccacaagacctgatggtttgggtactggtctggacataagtccccatcttcccagaaatatcatcttttgtctgcaacaactggctggagaaatatttcagaaagatgtgtgtctggaacacccaaagacatacttttcctttctccttggcataggccttgcagcactgaagaaagaccaggtttgcaatggagccttcaacagtcttcatccctatggaactcagggtctcatagggtgacaggagaggagacaaagctaacttgggaagagtctctgtccttcagcttctcccctactgaaacactatatattgggcccacagttcatcacaaaacacacatgctctctttctttctctcacacccaatcttgggaacccaaaaacttgatggcaggtagctctgggtatccttggtctggcattcacccactgggaatctaagctgtcctaaagctcttttcaatcacttctcactgtttccaggcccatgtgggtaggtgttccaggcttcattctttcaggctgatcataaaggcacagtgtgggaaaatcccctactgtgatggccattgctgggaagcaggaaaggctaagggcccactgctgcccaaggctagtatagatgccctctgctccactcatgtcctcaaagactgatatcaggtgcagcagctgctgtctggaatgttatcaaaccaggactgcacaggcactgcattctctgtgtggaagacgtaagaagcaggcgagttgtccaggatgagagttttcctcaggtccctccccagatggctgaggtcattgacatagcagccctggtggaacaaacgtgactcatgggctaggcaaccccagaacacctcacactggtccagcacacccatcacaatgtgtctggaattggtgggttcttgttctcactgacttcaagaatgaagccacagaccctcacggtgagtgttacagttcttaaaggtggcatgtctggagtttgttccttctgacattcggatgtgttgagagtttcttccctctggtgggctcgtggtctcgctggctcaggagtgaagctgcagacgttcgcggtgagtgttacagctcttaaggtggcacatctggagttgttcattcctccaggtgggttcgtggtctcgctggcttcaggagtgaagttgtggaccttcacagtgagtgttacagctcataaaggcattgtggacccaaagagtgagcagcagcaatatttattgcaaagagcaaaagaacaaagcttccacagtgtggaaggggacccgagtgggttgccactgctggctggggcagcctacttttattcccttatctggccccacccacatcttgctgattgttagagccgagtggtcttttttcacagggcgctgattggtgtgtttacaatccctgagctagacacaaaggttctccacatccccaccagtgtagctagatacagagtgttgattggtgcattcacaaaccctgagctagacacagggtgctgattggcatgtttacaaaccttgagctagatacagagtgccgattggtgtatttacaatccctgagctagacacaaagtttctccacgtccctaccagactcaggagcccagctggcttcacccagtggatcccccacagggtctgcaggtgtagctgcctgccagtctggcactgtgcacccgcacttctcagcccttgggtggttgatgggactgggtgccgtggagcagggggcgacactcatccaggaggcttgggcacacaggagcccaccgatgggggggaggctcaggcatggcgggctgcaggacccaagccctgccctgtgggatggcagctaaggcccagcgacaaattgagcacagcagctgctggccgaggtgttaagcccctcactgcctggggccggtggggccagccggcggctccgagtgtggggtccgccgagctcgcgctggccttcaagcactgcacgccgccctggttcccacacgcacctctccctccacacctcgtcgcaagctgagggagccggctccgaccttggccagcccagaaaggggctcccacagtgcagcgacaggctgaagggctcctaaagtgccgccaaagttggagcccaggcagaggaggcccggagagtgagcaagggttgtgaggactgccagcacgctgtcacctctcaacaggatctgcatacttgttcagtctggaatgaagagagcaatgaagaaaacacatttaaacagttcctccagtcatctcaggaactcatccatataaggcctcatggtcccctcaatctttacagtcactaggcagtcagcattgctgattggcttaatggagctatgcacaagggtttcatccatgtcagtgaccatacagatcgttccttgatttttctctgtcacctctgggagcaggcaggtccctgggatctgataaaactgatactggagacacttgagctgatccgacttagcaatggtgttgactccctccttatgtgtggagaactcagtgggggaacttgacttgccaacatgctgggtgcaagaacagcagaaaggtaccttctaagatgtcacaaacatgaggcctcttcggagagcactttggaaaccaggccttgcttgctaaggaccagggcatcttccctccatgcctgggtggtgatggagcctggttccatctaacaatcctgagggctcggctggctgggtgggaagacagcgggcacgttggctggactgggctggggggcatgggctggggcctgattcagttcccgagagtctgacttccacagctgttcacataccccttctcctttccatcacaggccgggaagagaggcggcctgtagggacggtggatggccttggcagcagctccccagggtgcccccagccccaaatcccccagcaggagcttcaggatcttcagtttgggtctaacctagggaatccacctcatactcatgttttttcaagttttattttaagttcagtggtccatatgtgataagcttttttttcaacttttattttaagtttaggggtccatgtgcaggatatgcaggtctcttacatagataaacgtgtgccattgtgctttactgcacagatcatctcatcacccaggtactaagcccagcatccgcagctattcttcctgctgctctccttcccctcccccatgccatgaaacaggtgtccagtgtgtgttgttcttcctgatgtgtccatgtgttctcattgatctgcttctgctaataagttagaataataataggtggtgtttggttttctgttcctgcattagtttgctgggagtaatggcttcaaattccaaccatgtccctgcaaaggacatcatctcattacattttatggcttcatagtgttccatggtgtatgtgtaccacattttctttatccagtatatcattgatgggcatgtagattgattacatgacgttgctattgtaaatattgctgcaatgaacatatgtatacatgtttatttaaaatagatttatattcctttgggtgtatgcccagtaatagtattgctgggtcaaatggtatttctgcttctaggtctttgaggaatctccacactctcttccacaatgcttgaaataatttacaatcccaccaacagtgtaaaagtgttcccttttctccacaacctcaccagcatctgtttttatttcttttttactttttattaatagacattgtaattggtgtgagatggtatctcattgttgttttgatgtgtatttatccagttatcagtgatgttgagctttccatgtttgttgggcacatgtatgtcttcttttgagatatgtctgttcatgtcctttgaccactttttaatggggttgtttgtttttctcttgtaaattttaagtccctcatagattctgggtattagatatttgtcagatgaataggttgcaaaatttttctcccattctctagcttctctgctctgatgatagcttctttggctctgtggaatctctttagtttaattagaccccattagtcaatttttgcttttgttgctatttcttttggtctttttgtcatcaaatctttcctcatgactatatcctgaatggtattttctagattttttcttctaaggtttttatagttttgggttttacattcaagtctttaatccatcttgagtcaatttttgtctatggtgttaggaagggttccagtcttaattctctgcacatgactagccagttatcctagcactatttattgaatagggagacttttccctaattccttgtttttgttgactttgtcaaagatcagtttgttgtaggtttttggctttatttctatgctctctattttgtttcatttgtctatgtgtctgtttctataccagtaccatgctgtttttgttactgtactcttctagtacagtttgaagttaggcaatgaccctttcagcttttttttttttttttcttaaggttggcttggctatttgggctcttttttggttccattttaattttaaaaagttttttttttctaattatctgaagaatgtcagtagttcaatgggaacagcattgaatctataaattacttagggcaatatgctcatattcgtggtactgattctttctctccgtgagcatggaatgtttctccatttgttttgtgtccactctgattcctctgagtagttgtttgtagttctccttgaagatatccttcactttccttcttagctgtattccttggtatttttttctctttatagcaaatgtgaatgaaagttcattcatgatttgtctccctgcttgcctgttgcttgtgtatgggaatgctagctacttttgcagattgattttatatcctgagattttgctactgctgcttatcaccttaagaagctttggggctgagacgaagaggctttctagatatagggtcaggtcatctgtaaacaaagataatttgactttctctctttctatttgaatactgtttatttcttcctctggcctgattttcctggacaagttttccgaatgggagttgtaatgcgagtggtgagagagagcatacttttcttgtgccggttttcagggggaatgtttccagcttttgcatattcagtatgatattggctgtgggtttgttgtatatggctcttcttattttgaggtatgtttcttcagttcctaatttattgagaattttaaacgtgaaggaatgttgaattttattgggtgctttttctgcatctattgaggtaatcatgtggtttttttatttagttttctttatgtgatgagtcacatttgttgatttgcatatgttgaatcaaccttgcatcctggagacaaagccaattccattgtggtggatgcactttttaatgtgctgctgggtttggtttgccagtattttattgaggatgtttgcacagtgttcatcaaagacattggcatgatgtgttgttgttgttgttgttgtatctatgttaggttttggtatcaggatgatgctggcctgatagaatgagttagacagaacttctttgtcttcaattttttttggatagttttaggagaaaatgtactatctcctctttacctcaagtcaaattcagcttgcttggtaggctagttcttactgtctcaatttcagaacacattattgatctattcagggttcagtcttgtagagagtttattttgcaaggaaattgtccatttcttctagattttctggtttatgagcatagaggtgtttatagtattctctgatcgttgttcttatttccatgggatcagtgatgatatctcccttattatttctatttgtgtttggttctttcttttcttatttatttgcctaactagtgttccatctagtttataaatttttttttttttcataaaaacagctcctggattggttgagttttttttttttttttttggaagagttctcagtgtctctatctccttcagctctactctgatcttggctatttcttatcttctgctagctttcaggtttgttttcacttggttttcttgttcttttaaccaagatgttaggctgttaactttagatctttctaatttttttttttcttgtgggagagtttcactctgtcacccaggctggagtacagtggcataatctcggctcactgcaacctccacttctcggttttaagtcacttctgctgtctcagcctcctgagtagctgggattacagatgtgaatcaccacacctagctaatttttgtatttttttgtagagatatggttttgctgttggccaggctggtcctgaacacctggtctcaagtgatctgcctaccccagcctcccaaagtgctggaattacaggcatgagccaccatgaccggccctttctagctttttgatgtggacattagtgctataaatttccctcttttcttggtttctagtgattattttattctatcttggtgagtagtcagggaaataatcttaaatttacaatcaacttatagtttaaatctaaataattaagtgagaagaaccctttgttatttgaaggggatgtttgaagattttgtaaccgtgccttttaggtagtcctaaatttctaattgtagttaaaaacatgccattttcatttctaacattttaagtatatggtttagaagtggtaagtatagttctatttttttttgcaataggttttagataatttttgtcttacaaaagtaaaagtgaatactcattaattctgaaacaagttagttagcttgctttagttagatagcaagagaagggtccctggaaagtccctggcccttgggtcagtgtctcatccctgcataatataaaaggaatcctggaaaaaatcaagctgcagacactaacaaggtaactagcacatggtgttgtgcttggagacctgcccatggctgcacagacagaaaaacctctggcatatttggataaaaacttgtacaaacctccagctcactgagataagggaacaagaccgacctggcatagaaatgcctttgtttgtccaggcacagtggctcatgcccgtaattccagcaatttgggaggcagaagtgggcggatcacctgaggtcgggagttcgagaccagcatgaccaacatggagaaaaatacaaaattagccgggcatggtgcctcatgcctgtaatcccagctacttgggaggctgaggcaggagaatcacttaaacccaggtggcggagtttgctgtgggccgagatcgcaccattgcactccagcctgggcaacaagagcaaaactacgtctcaaaataaataaattaataaataataagaaagtacatctcaaaaacaaaaatgaaagaaagaaagaaaagaaaaagaaaaaaagaaacgcctttgtactttgtgcagtcagtgggctcccaggaaaatgtttcttctccttttgtgggcataagcacagtgggctctggtgcattccggtcgacactctcctttatttggactgtaagtcagacctctgtgaataattacttcagcccctgattgctcccgggacaagctcctgcgccaagctttcactttagcttctgataagtcctgggccaatctaaatagcatctatgaatcatcccttcagctcctgattggtcccgggtcaaagtcctgggccaagctgagccacacttttttcaagacagcctgttaactaggcacatttccttctcttcctttcccagtccataaaaaccttgggccccagcctcacagaggtcaccccattcagaaactatctctgctggcaaagagctttcttctcttgcttatcaaactttcactctaacctcacctttgtgttcacgctccttaatctccctagaagtagaacaaagaactttcgatgctatctcagactatgagagactgttacatcttggtgcactgctgagactacaacacttggtttctttgagtttgactaaatattttacataggtgtaattatacagttttcctttttgactgtcttgttttacttaacagaatgttttcgagatttgtccttattgtagtacttttcaagatttccttatttttaaggctgaatgctatccagtgaatatacgtgccctgtttgttgaatctactcatccttaaaggtacatttgcttccaggtagtatgtttgtgagtaatgctacagtgtacataaatgtgcatatatctattccatgttctgctttgcctgtttgggatatttttcacacactgatttagtaccatgtgtattcccttgcttttgttgtctgattcgttgatgttacatcccccaaattattgccgagaccaattgtcatgaagcttcacccttctgtattgtgctaggaattttacagctatagattttacattatagtcttcatattttaaaattgacacatgtaattgtacaaattttggggaaacaattatgtatatatgttgtatagcaataaaaatcagagtacttagtgtaattattgcctcatacatttgttatttttgtggtgagaacattcaaaagcttcttctctagctatttttttatatctttatatattaactttttttagagacaggatcttgctctaacacacagattggagtgcagtggtgcaatcctagctcactgtaacctcaaacaatcttctaacctcagcttcccaattagctgagactacaggaacctgcctccatgcctggataatgttttaatttttcatagagacagggtcacactatgttgtccaggctcatcttgaacttctgacatcaagtgattctcctacctcattctcccaaaatgtatggatggcaggaatgtgccaccacaactggtctcttttagctattttgtaatttgagataacttttcattaattattattattctgctgtgtaacaaaaaacaaaaacttatttctcctatctaattgtaacacaatacttttgaagctgccttttcccatctccctgcttcagtctctgggaacccctgttgtactctttgcttatatcaaccctttttttcaggttcctcaaatgagtgagataataagatcataaagtatttgtgtttctctatgtggcttattttacttaacatggtatgctcaaggttcatccatgctcttttaactgacagaattttatcctttcttatagctgaatagtatttcactgtgcatatatagtacattttccttatccatttatctgttgctgtacatttgaattgattccatatataagctattataactagttctgtaactaacatggaaatgcaaatatctttttgacacagtgatatcctttcttttgtatatacatgcaggagtaaaattgctggatcatgtaatacatctatttttaatttctttcagaaacctccatagtattttctatagtggccatactaatttacaattccaccaacaatgtatacattcactcattttatatcctcattagtacttgttttatttatttatttatttttattatagccattctaaatgggagtgaggcggtacctcattgtggtttggattttcatttccttagtgattagtaatgtagaacatatttttatgttccagttagccatttttgtatcactttttgacaaacatctattaagatcttttgcatttttttaattagattataagtgtattttattttgagattttaaagtttcttatttattctgaatattagccttttgtcatatgtatagcctgaaagcattttcttttattgcctaagctgtctcttcaatcttttagtttttttaatatggaaaagcattttagtttgacataatgttgtttgcttatttttgattttgttgcctatgttttgacatgttattttaataatcctttccccgtcgaatgttataaagcattttttagtttttctctaatagtttcataattgatagcattacatttaagtctttagtttgaattgattttcatatatggcaaggcacaggggtctagtataatttttctgaatttaaatatttaaatggccctgcatcatttattgaagaaattagcttttccctaaagtgtgttcttggcaattttgttgacaatcagttggctttaggtgcataaactaacttctgggcttcttgggcacattagtctatgtgtttgtttttatgccagtacagtgctcttttggttactatagctttgtagcaagttttgaagtttgataaagtgatgcctttagctttgcttattttgctcaaagttatttgtctattcagagttttttgtggatccacataaatttaaaatattttttctatttctgtgaaaaaatgtcattgatattttgataaaaatattacctcccacagggtccctcccaggacatgtggggattattacaatttaagatgagatttgattggggacacagagccaaaccctgtcaattacttaaatccaggagttcgacactaccccgggcaatattgtgacaagctattggtaaaaaatattttcacagattactcaggcattgtggaatgttcctgtagtctcaggaagttggaggctgacgtaagattattccttgagttccccaggaacttgaggctgcattgagctataatcatcgtattgtattcctgtctgggtgagagagtaagacctctttttagaatttcaaatttattttagatttaggaggtacctacacaggttttttacatgggtattttgtataatgctgaggtttgaagtatgagtaattccatcaatcaggtagtgagcatagtactaagtagacagtttttcagttcttggtccctccctctctccaccctctaagagttgtctattatttttgtttttctgtccatgtgtacccagtgttaatttccatttataagtgagaatatgcagtattttcattttccatttctgcattaatttgctttgtataatggcctttagttgtgttaacgttgctgcaaaggaggttttttttgtttgtttttgctaagtagtattgctgtacatgtgacactttttaaattcaatttaccatcaataggctggacatggtggctgatgcctgtaatcccagtgctgtgggaggccaaggcgggtggatcatgaggtcaggagatcgagaccatcctggacaacgtaatgaaaccccgtatgtactggaaatacaaaagttagccaggcttggtggcatgcgcctatagtcccagctactcgggtggctgaggaaggagaattgcttgaacctgggaggtggagattgtagtgagctgagatcgtgccactgcactccagcctgggcaacagagtgagacgtcatctcaaaaaaataaaaaattaccatgaataggcacgtaggttgattcaggtccttcctcttatgaatagtgtagtgatgaaccaacaagtgcatgtgctattttggtagaatagtttattctcttttgggtatatacccagcggtgaaattgctgggttgaatcacagtttaactctcagttatttggaaaatctccaagctgttctccacagtggctgaactaatttacattcctattaacagtgtataagtggttttttccctctaaaaccccatcaacatctattatcattttactttttaacaaaaaccattctaactggtgtacaatggtgtcttattgtggtttttatttacatttccttgatggttagtgatgataagcttttttcatgttatttggccacttgtatgtgttcttttgaagagtgtctgttattgcccactttttcatggggtaattttttccttgtgaattctttaagtttcttatagattctgagtattagattttgtcaggttcataggttatgaatatttttgccattctgctagctttggggtaagttagtttttatttttctagtttctctaagtgtgatgttaaattgttagtttgagatcattctaacttcttgatgcaggtatttagcactctcaactttcctcttaacagagctcttcctacaacccagacattttgttatattgtgtctcttctatttcaaaatctttttaattttctgccttaatttttttgtttatccaaaattcattcaggagcaagttgtttaatttcaatatcattctgtgattttgtgagattttcttggtattgatttttatctttgttccattgtggcctgtcatattctgtgagcagatgagaagaatttactttctttagatgatgtgttgcatatactataaatgtctattagtttcaattgatcaagtgtcgaatcaaactccagaatttctttgttaagtttctgcctagataatctgtcaaacacttagtggggagttgcattcccctactattattgtgtgtctacttgaggcttattgtagttctagcagtaattgttgtataactctatgttccccaaagttgggtgcatctacatttacgatagttaagtcttcttgttgaattgaaccctttatcgttacgcaatacctttctttgttttattttactattaatgatttaaagctattttttcttaaaagagaaacaattccaggtatggtagcttgtgccagcactttcagactgaagcagtcggattgcctgagaccaggagtttgagaccagccgaggcaacacagcaacatactgtttgtacaaatttttttaaagaaactatacaggaggggtaatgtgcacaactgtggtcatatttactcaggagacataggtggcatgactgcttgacttccgaaatttgaggttacagtgagctgtgattccaccagtgtactctgtcccaggagataaagtaagatcctctgcataaaatgaaaaagtaaagaaaaataaaaagattttaagttaaaaaaataattcctagatctccacttctttaggttcacttgaatatatatttttctcctttgattaggttatatttcctggttgcttttacttactgtagttttgttaaggttttgatcaattaagaaaccactacctattttatcctttatgaaagagctttatacatgggaaaattgacaacattcagccacagtagtcatactgggagcttctccaatctgttgtcaaaatgtgtcttctttggactactgtatgtattttcttgttaataaggtttacctctgtttcctcttaggagcctttagtctcttcccttcgtcactgttgtaggcactacagtctctgttgttgtaagaagcatttatctttattctcagttgacccaagctgtcatttaaactcagtctctattctcatcaacactaaatgttaaaggaagcaatttccagtctttagataaccccggtataactcagtaagtcagaagtttgcatacgcatttcactcttttttctttcccaaaggagaatcatggaatggacagatttttatctaactgcgctgttctgtagtgcacaaatgtgaccaaattttcttctaaatgtggttatggttggcttttttctcatgtggggtgctacaaactcaactggctttgttcgcccaattgtagttaagttcatatgtcaatggagagaaacaggatctcaggttctgcttcaactgtcattgtcttctcagctgacctcattttgtacattagatttataaaatatatttactttaatctcatcaccgaatttttaaaaaaattattatttttcagctcttttagcaatatatccaatcaagacccagagaaaacagtacatagaagcttcttttcaaaaagtaatattgggaagatatgggagctctggccttgaacttttacacttaggagagtgggaaattgaaggataagtgtaaacggcacaaagtatgctatgatgaatataccagatacacagcaattacctacagcaaaaatgtcactgctagaagagctcaaaaccataaagtattttggaaaaagcataattaatgttgattcttttttctgaactatatatttatataattacataccaataacaatttttgaaacatatcatgtttttgaaacaaaatttagaaaatcgcaatagtggcctaggccaggaatatttcttctaatgctatccctcccatagtcccccacttcccgacaggctccagtgtgtgatgttccccttcctgtgtccgtgtgttctctttgtttaactccctattatgagtgagaacatgcgatgttagcttttctactcttgtgttagtttgctgagaatggtggtttccagcttcatccatgtccctgcaaaggacatgaactcatcctttttatgactgcatcgtattccatgatgtggacatgccaagttttctttattcagtctatcattgatggtcatttggtttgtttcaaagtttttgctcttgtgaacagtgccataataaacatacgtatgcatgtatctttataatagaataatttataatcctttgggtatatacccagtaatgtgattgctgggtcaaatggtatttctcattgtggatccttgaggaatcaccacactgtcttccacactggttgaactaatttacactctcaccaacagtgtataagtcttcctatttttccacatcctttgttgtttcctgatttttttaatgatcaccattctaacaggtgtgggatggtttctcattgtgtttttgatttgcatgtgtctaataaccagtgatgatgtccttttcttcatttgtttattggctgcataaatgtctccttttgagaagtgtctgttcaaatcctttgcccattttcgatgttgttgtttctttttttcttgtaaatttgtttaagttctttgtagattctacatatcagcccattgtcagacggatagattgcagaaattttctcccattctttaggttgcctgttcactctgatatagttttttttgttgtgcagaagctctttagtttaattatatctcgtttgtcaattttggcttttgttgccattgtttttggtgttgtagtcatgaagtctttgcccatgcctatgtcctgaatggtactgccttggttttcttctggggtttttatggttttaagtcttatgtttaagtctttaatccatcttcagttatgttttgtataacgagtaaggaagaagtccagtttcagttttttgcatatggctagctagttttccaacaccatttattaaatagggaatcctttccccattacttgtttttgtcaggttcatcaaagatcagatgattctagatgttgagtgttatttctgaggcctctgttctgttccatttgtcaatatatctgttttggtacgagtaccatcctgtcttggttactgtggccttttagtatagtttgaagacagctagcatgatgcctccacctttgttctttttgcttagtattgtcttgtctatgcaagaccttttttgattccatatgaaatttgaagtagttttttttctaattctgtgaagaaagtcaatgggagcttgatggggatagcaatgaatttataaattactttgggcaatatggccattttcataatattgattcttcctatccatgagcatggattgttttcgtttgtttgtgtcctctttcatttccttgagcagtggtttgtagttctccttgaagtggtcctttacatcatttttaagttggattcctaggtattttattccctttgtagcaattgtgaatgagagttaacacatgatttggctctctgtttgcctattattgcgtataggaatgcttgtgatttttgaacattgattttgtatcctgagactttgctgaagttgcttatcagtttaaggaaattttgggctgagatggtagggttttctagatatacaatcatgtcatctgcaaacaaagacaatttgacttcttctcttcctatctgaatacgctttatttctttctttcttttgctgattgccagaacttccaatactataatgaataggagtggggagaaagggtgttcttgtcttgtgcaggttttcaaagggaatgcttccagtttttgcccattcagtatgatattagctgtgcatttgtcataaataactcttattatgttgagataggttccatcaatacataattcattgagagtttttaccatgaagaggtgtggaattttattgaaggccttttttgcatctattgagataatcatgtggtttttgtcattagttctgtttatgtgatggattttatttattgatttgcatatgttgaaccagctttgtatcccagggattaagctgactagatcgtggtggataagctttttgatgtgctgctggattcggtttgccagtattttattgaggattttcgcatcgatattcatcagggatatgggcctgaaattttctttttctggtgtgtctttgccaggttttggtttcaggatgatgctggccacataaaatgaattagggaggagtacctctttttctattgtttgaaataatttcagaaggaatggtaccagctcctctttgtacctttggtagaattcggctgtgaatccgtctggtcctggacttctttttgttggtaggctactaattactgcctcaattttagaacttgttattggcctattcaaggattcgacttcctactggtttgcacttgggagggtatatgtgtccaggaatttatccatttcatctagattttctagttaatttgcaaagaggtatttataatattctgtaatgatactttttatttctgtgggatcaacggttatatcccctttatcatttcctattgcatgtatttgattcttttcttccttattagtctggctagaagtttatttattttcttgatcttttaaaaaaaccagctcctggattcattgattttttggacgggctttttgtgtctctatctccttcagttctgctctgatcttaaatcttgtcttctgctagtttttgaatttgtttgctcttgcttccctagtttttttaattgtgatgttacggtgtcgattttagacatttttctgctttctcttgtggggatttagtgctgtaaatttccctttcagactactttagctgtgtcgtattttactttttaagccctcaatcttcctttttcatcgtgatagtctttactgttttatgtttatgtaatgtaaaattgactacacaatttttacaaagattttatgaaaatattttattgagaatgtacaaaccgtcagtcaattagaggagaagttacactgtcataataaatagccacaaagcaaaacgccaaaagacatccaaatcagaataaaacaaaacattttaacaaaaacaaaaagaacaaactggcaacaaatatgtgaagtttatattacaaagatgctcacttatccactctaaagagagcttttagaatttgatttaaaatacggcaaagacattatcccacacttcacagaaaaaataaatttaagcagctgttaacacatgaatgtattatcaagctcagatataatcaaaattaaatatttgacaagagattctacagtttgggagaaatagaagtgtttttttcttttccccaggcccacaagtctagtttcttgttcttcttcactataatggggtttgtcatcagctccccaaaatatgggaagcacagagcaggtggtggctgaaggtggggtatcctgtgaaaccatatttaagatcagagcccttggtccattgtgttgtaatcagctggctcaggaaagaacacctggctgtccagagctctacacctactgcactgggtgtgaaaggaggcctgagaacccatgggtcccaaacccaccccactccaaattatcatccagtattgagaactctgacaccaaattctcacagagcatatgtttatgcagttttacatttaatttctcattacattacaattgggaaactgaggccccagaagaggcagagactggtccagatctcaggaggtgggcaggctccagagcattagagagggctccagcttcctaggccttggcaccgtcccacttatcaggtttgttttcgaaattagagtctgtagctacacattcaggagcacagaaaatgagcagattcagggttctgttcacatggggtcctctccatgtcagtttcaagataacaggactggggttctgcatccagctctgagggcaactggaagtaaaatgagctatgctccacctcagcctaatgtagacagtgcctacaggaaagcttgttttcttcctcataaataggggtgcctgaagtgggtgaccttgatgatttcacatactcataagtgtctgccagcctggattcttgctctgagactgcaaaaatgcacccactctgcagatccttcaaatcagagggaggcatggccacttgagaggcatcttgggtagatgaagatgagacagagttaaatgtgccagagcactggactctgaggctgaggtccacggaaaatctcagctactgttgcgttcttaaggtcctcatttgaaagtggtagaaaataatttcactggataaggggaggatacctcatgagtaaatagcacaaccaaaaaggtggaggcaaagagagggcaaaacgggattcctagttcactcattatacttggggccttcagatcctgctactttatcccctaggaccttgaagaaccagtgtcttgaggacagaaaaatcaaggtatcagatttgttcagtagtgctcctgcttggggctgtagggttagtgatggccaggaggtggttacagcctactgtgtttctggtgcccactgagctttgctggagcagctggaacaagtaacagtcacacacctcatgttgttatcagtgatgtccacattatcaggtggtcaaaaggggaagggatattagggatcccccatataatcacttagccagtcttttttcccttgcgctcaccatttgccagcgaccctggtgggtccaacatgtggtacagaaaattattacttcatgtctgcaccccccaacccaggaccaaacaatctgaggaccgctggacaaaagcactaaagcaagtatatgtgaaagaaaagagcaaggactataatataaagtagattattgagaagaaaacctggaaaattattgcatgggaggacctcaggcctcactgaggtgacttttaatccatgatgaggatgacagcagggaggcatctgcacaagcatgtgtcagggagaagccacccttagtgaaaaaactcataggtgtgagtttggcagaggtaaaaagggactagtttggctgcagacagcctgagaaagagataagcagagggatggagaatcctagggcctgggagatgaggttagatatctgctcctttctgacaacattgccctaaaagtcagcacttttcaacaacatataatatctcataatgtgtgtggaccagaatctggacacagctcagctggctacctctgccttcaggtcttttatgagactgggggctgtggtcttaactgaagctggactgggaaagcatgagcctttaagctgactcatgtgaaaattgacagggtttagtgtggctggagagcctgactttccttctctctactcgtctgagcaccctctcaccctttgttatgtgggtctctacatggagcatctcatagcattggagcttgcttcctgtgtttgaggaatacaatagacagaattagacaaaaaggtttacacaaaaagagacagaaagatcgagggcgcaaacgagaaaaacccagtaggagaaaaattagagctttaaaaacatcttgacagggtgcggtggctcacacctgtaatcccagcactttgggatgctgagacgtgtggatcgcctgaggtcaagggtttgaaaccaacctggacaacatggtgaaaccaccgtctcttctaaaaatacaaaatgagctagatgtggtggcgcatgcctgtaatcccagctacttgggagactgaggcaggagaatcaattgaacctgggaggcaaaggttccaataagccgagatcacaccactgcactccagcctgggatacaagagtgaaactgtgtctcaaaaaaaaaaaaaaaaaaaaaaaaaaagaaagaaagaaagaaagaaaaaaaacttgagagttactataatttttcttctatatttgtgttaaaattgtaaccccgggcgtaatgctataaggaggtagaatgtaattaaacccttagggtgggaccctcataatacagattactggctttatacaagaaaccgcagagggctctcatcctcctgcaaaatgagggtaaaacctgaagtgtgcaggctgaaattcagaagccagtcatcaccagatctcaaccatgctgacaccctgatctcaaatttgaacctctggaggtatgagaaattaagtcctgttgtctatatgctgcctatctatggttctttggcatagcagcctgaactaatacaaaagtgatatccttttctgtgtttcattggagagaagctgaatttgtaccccctatactgttaaaaaaaaagacttaaaaaatggatcttcagaatgaaagataggaaacggcttgttgaaacactaaaaatttaactgctataagttttttaaacattggctgaaattgttggaaccaatattgccaactgaagtccatgaagcatcactttgcagactttggagcccaaatttccattgtgtgcttcatactaactctccctgaatttgtatgtgacctgtgaggaaacaagaagagatgactgtatatgtctcatgactttccatattcctactttccttccagcaatcccctacagaacccacctattaggccttttctaatcactgccttaaagccagtatgacaaaacaaatttgatttgaactcctatctccttgttagccaacatacaagatgatattttcctcaaaaccgaagggccatagtactggcatcaggaagtattccattttattcaataaaaaactgagtcactcaatacctagtactgggagactttgtgaagacttcctctgtcatagacgtgataaggcacatggatatgattctaaatataaagagaaagcactagaaagttgaattcctgtattagatcattctcatactgcaatgatggagtacctgagactgggtaacttataaagtaaagaagtttaattgactcacatttccacataattgtgggggcacctcagaaaccttccaattacagtggctgacaagtgaagtgagtgagagcatgggatgtaccagatgcttatgaaactatcagatctcgtgagaactcactatcacaagaacagcatgaggagaacccgtccccataatccaatcatctcccctcaggttttcccttaacacctaggggttataatacacaatgagttttgggtggggacgcacagctaaactatatgaatgccagaggacagtatctacatttaatttcaacttcatactggagcagaatgaaaatgaggcccagtggagaagtgatatttccaagatcaccctggcagacaccaggcctgtttgagttgtggcccatgctacctcccacctattctcctaatgcttccatctctaagtgtatgcattatctacaggtgacactacatcattatttttatgtcttatcttatatacacctaatacattccctaggaagtagatgttagcatcatcaccagtgtgcatgttaggaggctggggaagccttgaatacagtgacttttactgggtcccagagatggtaagaaaaacaaggttatgttccagctgtctcttctatcctggaacccaggttgcatttaggtctttccagggaattaaggggaagttgtgtttgcataattgtgtacaaataaagagttgacatggaagaggagactgagcaatcagtagcatagtggggcctttcggtatgtcttacagaaacatggggcccagtagatggaaccttgaagagtttaacatactttcttggtgtcagaacccaacagcagttaagaaaccaggaatccacattcttgagacagctctgtatccacctctgtttgtgagagttgctcaagagagtgagatgctctttcattgtgccctgaaatttctgagtttcagccttacaaaggctcaatgtaaaagtcttatctgataacacagatgtcaactgagccctcatcactgatgtccctggcttttggccgggtgcacctacaaataacacagggcagcccaggacaggcccctccacgccagcctctcttgtcaactcatctgggcagtcccacaccacttcttagtaccatgagttggatggggagcaagagggagggcactcttcttggactgaagtagattgtcgggtgttggaactcttgtgtacctgtcatgttcatacctaggccatagctggcagaataaaaagaagagggttggagaacgagtctgtgtactcagatgtgaattccaagactttaacttgtcctctggtttccttccttcatggagatttatacagattctccttatgtgcctaatctgaagagaagaatttcttttattttcttttttcttttttcctttcttcttttcttttttcctttcttcttttctcttttcttttctttctctttctttctttcttctttcttttttttttctttctctttctttctttccatctctctctttctttctttccttctctctctctttcttttttatttatcatgaagtctcactctgttacccaggctggagtgcagagaaaagcagaatttctaatggaggtgtcacatacggtcaaagcaaggaagaacacagacttttctttgcgtggtttctaggcacatttacaaagctgcattcagattgatgaggagcttcatcattcagtttaatgtggccaactcctccctctttttggaaaaagagcaggtgcactaaaccagcaaacacagccagcactgggctgtgctgagagcagccacataggggtctctacagacagaaagctgagaagacagggaaagaaacaggacccagactcaaatatgaaaaatctctgggctttgtcctacggccttcccatgagtaactcatagccttgttccagtggaatctggccttcactagtctcagtggcaagttggttatgtggaaagtctctcttcacacacttgtgcgaataacggtaaagaattttgtatagttttcactttacattaggccatgagtatttatgcctgtggctgcagtttgtgttagtttccggccccacgtatctcctgcagcatgcagcttcagtcctatcggaccctcaaaacttaaaagctaacactattactagggaggatttcgcaggaaaatggagaaagggttacacacaaaaaaggttaaactactctatgcatgtttctgcaatgtgttatctcaggaactcatttctgtagcccatcagggcaggagctgggctctcacctgttgataatattccataagggaggttcttccccacagtgtttagtctcccgacgctggtacagcctgacatgatgacattctactttcatgtcggtcatgctgcagggaaaattctgagtgttctaataggctggaatcatttgctagggtgaaccccatctttggttctcacttttctgttatcttgtaattagctttattctcagcaaatccatgtctattttatttatctgtttatttacttatttttatgtatggaaaaacacttttttttatttacttatttatttagagacaggtctccgtctgttacccaagctggagtactgtggtagagtgctgtgatcatggctcattgcagcttcaaactcttgggctcaaatgattctctcacctcagcctcctgtgccaccatgccctgctagttgattttaattttttataaagaaggagactcattaggctgcccaggctggtctcaaactcctgggcccaagcaattctctcatctcagcctcccaaagcactgggattaaaaacatgagccactgtactgagctgtgcctacttcaaaagactgaaaataaaaaatcaataaatctttgccaaattaaaaaacaaaacaatagtttccaggtcttagacaaagacaattctgtgtcatgaagagtggcaaaaggcttatttagctgttaaaatgatttgcttatatttcaaagaagcagagaaaaaaagatacatataaaagttttccaggccaggcacggctgttcatgcctgtaatcccaacatttggggaggccaaggcaggaggatctcttgaagccaaatgtttgagtccagtacaggcaacatggtgaaattctgtcaccataaaaaaataaataaaataaatatggctggacatggtggttcacgcttgtaataccagcactttgggagtcggaggcaggtggataatgaggtcaggggttcgagaccagcctggccaaaatggtgaaaccctttctctcctaaaaataataacaataaaaaattagccaggcatggtgctgtgcgcctgtaatgccagctactcaaaaggttgaagcaagagaattgcttgaacttgggaggcggaggttgcattgagctaagatcatgccactacactctagcctggcccacagagcaagacactgtcttgaaaaaataaataaataaataaataaataaataaataaataaataaataaaaagttagctaggcctggaggtgcatgcctatagtcctaggtaattaagaggttgaggcaggaggactgctcaaacccaagaagttaaggttatagtgagctatgattatgccattgcacttcagactaagcaaaagagtaagattccatttcaaaaaattactaaaaaaagttctctaaattacattgtttaagaaaagggaaaagaaaaaatatcttttttaattttcaaatgggagaatagagcctctcatttctaatatgtatttccttctgcaaaaacatggtctaggcccatggtcttgaactactggacatctgaattttagtaggtgctggattcaggcaactgaggggtggcttggacacactaagtgcacgtaaataaaaggtttgaggtgaactaaaaggtaaaagaggggaaggtgctattaagaacccacagttgggagacagtacagggttggtggaaggactggttcatgctacagatactgacccaggtgaaactttactctgacttatttctgtgtccatgcaggaagacgagattatgatcaggtggcacagaaacctgggatggtgaaaaaaccaggttgcccctgcagattcggtgtctgaggtagaacgtatgccaggggtcttgtaggcacatgtgtgggtttttggtgggaaagtctatgaggaaaggtagcatgggcaacaatcttgatgccaaagccttgtcctgagaggggcttggccacatcaacatgcagtgtgtatgttcagtgggtgaaaaacctgtggtggcctcaggttggcaggagggtagaaggcatctgttctcagaacttcttccctcagagtcgtcggtccttcttaccatgggagaatgcctggaaccacagggcagtgcatggtgtagcagcctgtgtgcagagcagagcctaccttccccgagacacctggagtctctctccagcagaggcccccacattgtctttctccttacaacacttttgatcctaaatgtgtaaagttccctgaaaacccactgcttctccaacacccatttgttgccccaaaatttaattctgacacaacttagagttcacacagatcccagaaattcagggctcagtcccacatcacccctctcactgtagaggagagttacacatccctgaagcccatctacacttctgagctacctcctataaatctgagactagcataaaccccttttcaagttaaataatttgatagaattactaaaaagaaaacctcaacaaataactgtaattatatttactactttattataaaaatataactcagaaacagccaaatggaagagatgtctagggcaaggaacagttgtgggtgaaggcaatcctggaaatagctatatttaaagaaattcccccattctttgcattctcaaagaacagcttagtgaagagaaacgtgcttcccctgatgactttgaggatgctccctgctgtttttttaacctatcacaaaaatggacacagattgcaaattcccatttttaaaaatgaacaaccattcagtaatttagtcttcagtggtccaaataacatactcttaaagaaactttgcttgtttctcttcttccaaccagcccctgaactttgactcacccacagcttcagcaaacctacaacccttatttatacatacccctcctaagaacaggctgagttcaaggtgaaacattatcttatctgggatcgcattttgctaccctccatcgtgtgcttcctttccaaccttctttgtaaacttgttttctcctccctatgaaataaggcccttttccacctaaccttagagatactcaaagatctaatcatttgtactttttctttgttgcaatacttcttaggtaacttcttagaccaagtctagaaacagtctgaggacaataacaattccattctaaaaagaatctcccaacatttcttctatctcaacctcaactgcatctgcctgtgaacttccagcttaccaaggctctatatcttctggcagtgacaaaggctccttccatggttggtgtgagtaggcttggacacctgcagggcagacacccaggaataatcaactgggccttcagtggtcctcttttgcagggtcaaggtgggccttagcttttagtcaatggtctaagacttctatttaccagttagtcattcagttagttttcaattcaaaaaatacttcatgtttgaagaatccagcaaaaattattcaaatctaagatataaaagagaggaaattacagccgggcatggtgactcatgcctgtaatccctacattttgggaggcctaggcgggcagatgacctgagatcaggagtttgagaccagcctgaccaacatgaagaaaccccgtctctgctaaaaatacaaaattatccaggtgtggtgttgtatgcctgtaatcccagctactcgggaggccgaggcaggagaatcgcttgaacccaggagttggaggttacagtgagcagatgtcttgccattgcactccagcctgggcaagaagagtgaaactacatctaaaaaataacagaataaaataaaataaaaacattataaggggcttatatcttataattcatcaagaaaagccaaagtatctatccctttcagaaaataaacatgtaatttaattatgttcaaaacaaatcatttagtaaacaattaatcatatgtgaacacttccaggaggtgcaaagtcccagctcctaaaacttaacattaccctcaaacacccagatggcagcatatggaatagagttattcactttcacaagttctctcttttgaaaaaaagaataacttatgtgataaatttatgtaatttgacaattaatctacctcatgtgcttgcagatatgtattcatttcctaccaccgtagtggaagagagattttccctatctttacaactgatagcatttccaacagtaagctgtgagattctgcttgaaatcacctctcaaacaaataaaaaacagacctgggagacatgctacactcattctgctgaggaaataggtaagtaacaatttttaacaaatgaaatacattactacttaattttattcaaaattcaccaacttaatgtgctttataaatattctcatacctttgaagctctactgataaaacataatttacagttaatgaaaaagtgaagttaaaataaatacaatcatattttcaaggtgacaaaattagaaggtgacaatggtgattgaaacacagacatatctgacccaagggtcaagtcaagccgttctattacttgggatattttccctgcttctatctggttcagtgatgtgggtcatgagcgtcctaccaggagctgctacgctctgctccactgtgtctgtgaggtgcattttactttgcaggtttttgcactgcctcactaggttgggtttctttgtcctttgaaatattttctctcccttcaccaatctgaggacattttttcctcactattcagcatccagttgcctggcatgcaatgtgtctctaaggaatggaaactaagcgttggggtaagaaattcttaatgtcctaaagggtttgcttttagcgcaaatgtatacgtggagattccttccaggtatagtgcatccaaccactccaaaaagaggctgcattcccataccttgggctgttccctgagaggagatgacacaagggatgttatttactagacacttcaagagtcatggccagtgttggtatcttggggattctcaaacagttttgaaacccaaaaccaagaaaataacacaagatggctgaggatgtattgccctgtgaggtttctgaaatgaaacctcaacccaaaaacattctgatggggtgtctgtgccaagggaagattaaagaaaggggcacaaatattttcttttcttttcttttctttttttttactgtggattgtcaggggattattatctgctttcatgtcctgtaaaatgtttacaaatgaaaaatatttttttaagtgtcatccactgctttttgaaaaaatgcagaattaaaatactgtgtctaaaatgtacaataaagaacagttgataatgttgtgagttacacaaggttagttagtgttggtaagtgtcaggaaagaactggaaatttaaactctgacagcaagccagagttaggctggggtaacagggtggtagatttgaggctcttcttgccacacatttggaaaatgcatgagaaaactaattctcttttggagcattaaaacaactaaaaaacaggcaattgcgttgaggtggctctagtgtcctgagctctgagtagagagacaggcaaaggcatccctagatccaaaaagctgcccattcttctccagctgtgcacctgattagataatttccactccagcacccatgattggatatagttcaattccccaccaagccccctcaggccatgagtgacatatgtgatttgacactggattgaataaagcaagaattataagtttttcctggatccttttctggcagggcttccttcatgcactggacactggccctgcctgtaaaatacttgcattttcatttgtgtgtaagattatttgtatttatgaaaaatatatatgtgttattcatacatggaagcaatataatgacaattgttttaaaatttcagatgttttactttcctggcacatccaggttttagagcaggcagcctgagatttcaaaaatgaggcaattctctaagaaataatatgtgaggcacatgtgaattttaaatattctagtagctacattttaataaatacaccaggcatggttgcctgttcgtgtaggttgaactgtttgggagactgatgtgggaggatcatttgaggcaaggagtttgagactagcccaggcagcatagagaaagccatctcaacaacaacaacaacaaaattgaaaaattagccatgcctggtgtatgccttcagtcccagctactcagaaggctggagctggaggatcacctgagcctgggaggtcaaggctgcagtgagccatgatcacaccactgcactccagcctcactgacagaacaaaactctgactcaaaaaactgatctctggaaaggcattttctttttctgcaacgtagccaaatagctaaatttgtattgaagccatcctttaatttttaacagggcaagaatattttctaagaccccgaactccagatatgcgatggggcaaatcctgaagcgtacatggctatctctcacagctaaagcacccctcacccctatccagcgcttcttacccctggcgcaagagagtcacctgcggggaggaaaactatcaaaatcccttaaacccaagttgtaaccgcacaactaaatcagaatccttggagctggatctgaaaaaaatacggttgaaagttgtgcaggtgattacaatgtgtaggcaagccagaaaaccatggctttaacgagcagcttttgttagaaatgatttctcaaatgaatgtaaaaacgtttgctgctgaattgtgacctttcaattttacctgcttttcctgcaaagtatattttgcagacccaggctggcttgtccttctgttcatggttcacccagtgccgtgtgtgctcagtgcatcctgtgcacgggtcactgtgctgtgtgcgctggccggggtgagcatcattcttcggggagaacctttctgaaaacaaagctgcaatccaaaaagttaaaaccatgctacttactgtactgaggtaaaaattaaaagacctaggggactcttccaaaagttaaaacgtaaataaatatcttggaacattaatatacacctgacgatgtcctgagtgaacacgccccactttaaaacaaaacaaaacattactattattctaaaatattaatttaggattgttatgcaaatatgtactatttaaatatttattgatgaataacatgcatacagcaatataggaacaaaatatttatggaatgcttgatgaattattactaaataaatacacttgtgtatgtaagaatcagatttgctcatgcccttgacactttctccttcccaaaggtaaccaagaccttaagagctaagtgtagataaactttgtcattttctacacgtgttttattacagaacattaaaaacgtatacataatacaaaaaaaggataacagaccagtcacccagatttaacagctactagtcatgtgtcatttttgtttcacctatacttccagccatttccaccccaatttcattattttttagcctttttggataaaatgtatattcattgcaaggtacaatgtgaactgtgaatagtagagagatggggtttcaccatgttgaccatgctagtcttgaactcctgtcctcaggtgatccacctgcttcggcttcccaaattgctgggattacaggcataagccaatatactcagcctgagaattttttcatacttctaagaaagtacaaatccatagggcacatgagaactgcaatgtctatctacagtaaatacagtttgataaataaaatgaaaggcaattgacctaaggtgaaaagaaaaacaaaaaacaatcaaagcatgggtactatgtgtcatctgtaagagcatttggttaagaataacaaacaaaccagttttatcgttttaatagccgaaattggcaaaatttctagtttttctttcataggaatgctctttgcaagaaaaaattttcatatagtgagagcaaaaatggcaaccatttgcaagtaaatgtcttatgaaattaagtagcagatatcaagctcatgaccttcagatagttacccctaactcaatcacttacatagcaagtgcagataattttcatagctccctattaaaattatatttgaatgcccttacaaattgtgactgtttttaaataaagttgaccaactaaaattttgtatatgacatatgataaattccccttcaagtcaccttacatttacttaattttattaggcagtgtctgtctaccacccaataatacttgacgattctccctccatttgcacaggcatcatagctgggaaacggattcacaagacccaggctgttccctacatatgtttcctcctccgacatcagttcatcagtcaatcaagccatgtgagagtggaggccttgtattccctattattcttgggcactctactccaagtaggaaaaggccaggaggtcctgttaaaggatgcactcagagcccgggctccctaacatatgagagtgctaaccagcaggtgtagacttttcaggagtgaagaatgaggcaggcattccaaacctggaccttcatcaccttttgtttcatctcaagacaattctgagggactgttttggagcgtgtctggaaggtgaaccttgaagaagagtgtgggctttgatgtgactcagttgagatctttcatggggaggcaggaattcaatgcccagaatctgggctggtgtctttgaggtcagtaggttgcgtctttgtatccaagtccattgttactaggttggaggctggagattctaaatggcttccagaccatctctctgattctctttgggagatggggtctgaaagacaatgtcagtagttttgggaaattctagaaagtgtgcttggaaacgtgggaagagctcttgcctagtgcctaaatgctccatttgcagctctagccaagtagatacttggtaggtatagagccgggtttgcgtttatatcagcaaaacctatgtcagagttgaagaagtagtcaggaaaaagcgtcttggtcgcaggccggggaacatcttaaaagcaaacttctagcctgctgactcttggcaatgagtgttggatcctggctaaagtgccttgaatgcagcatgaggccaatccatgaatccaacttctcatggagaaatgttaatattttttcagtttgaatcaatcagggtgaaactaccatgctattggtttgcttactttttattatttcatgtaaaatctaagacaaaatacattaaatgcttattgacatatgtatttattcttcaccaggctgataatatctgcctaattttaaactttcttccattttgtaggtttcaacttattctattgtaagatactgttaaatctaatagaggcattgtcacttttacgtataattttattttatttcatatatttcctattggctttttacatttaaattatggagcacttcatcatataaaaaacttcaattatatttaaacagtaagtctttggatttttttgccttgtaatttccatattacataataatgagataaacattaatgttttcagggtactttaaattttagataattactcattgtattcatgtgaaatttgtttttactgcatgtgtgggttggaggactgttttcacttctgattcatctttactcttatctcatcagagctcatacctcttgtagttgggggattgcagtttataattccaataaatggggcaaattcaataataacataatacaaatgagtttgaatgcaggacaggtcttcaaagcatacacaacatgggcctacatatgtacaacaataataatttataagttactgtttggatggaaagtaaaagtacagaaaatttgttaaaggaaattaaaatggagatcatgtctcaataatctctgagcagacaaaattagttaggtctcataagtgatctcaacctcgcttgatttgcaaatacaaacaaaacttaaattatttcttgtagctgcatattgaaaaaagagaaatgaagctcaaccagtcagaagtagccaacaaccttatataaatagaaactgtccaacaaggtaaacagacaaacaaaaaacaataaaaaaagttgtgctaccaccaaatgatttctttgtttctacatttttcaaataaatacttgcttcttacactgtcaatgaagcactcaatatctttccgtctgatattttataatttatcaattgctcttactcaaataaacactttgcaatttcattgtgtctcaaattactttttagcagaataaactaggaataaatattacaaaaatatctacggaatatggaaaaaacatagaaagtttatgaaatatatgaatgtagacataagcaaatagacaatttgtatcatattcttaggcagaaaaactcaatattatcaacatcaattgtccttatagttatttataaattcaattttgttcctatactgataccattaaatattgcaagtacacgttactataaaatgttatatagatgaaaacacaaacaagaatagacaagaaaactctgaaaaaaaaaaaaaccactggcaagccctgtgtaaaatcttgattgattaaaaaactcatggatcactgaaactaaaaattcagaaataaaccaaagtgtctaagaaagtgtcatagtgcatcttggctgctataccaaaataccttagactgggtaaaggataaataagagaaatgtatttttcacagttatggagtctggaaagtgcaagatcaaggcagcagcaaatttcgtatatggtgagagccctattccccatagatggtaccatctcgcacatgggacaagggcattcccttcaacttcctttgaaagagcactgattccattcatgaagatgaagaactcttggcttcaccactttcccaaaggcctcacgcctaaaattatacacatgaatttgaaaggggacataaacattcaggccatagcaataaaaactacatgggtgatggcatcatttatacatgaggtgtaaaaatgtgatgttcttatcacaaaggaaataaatgatttattcttcatggcatatatcaaaatgaaggtccaatgaaaatattttttatgaagataaatctatatggcaaaaaattaagtattgataagtttaaccctacaggttgcatcaggattttcaaggtttccagggatgagcaaggccctggagtttcctcctgtgacattttcctgaaagttgctcatgctgttattcaatttgaaagtagataatattgtttgtttctcttccaatatttactaaattcaaaataatatagggctctttactcataattctcaaacaatcattcagtcagtggggctctgctgaggaagagcacagacacatccacacaagtataatgttcctcaaatagaggacttctccttgtgctggagccacctatgttgcactcgatcagaggctttcccaggatagcatttctctgcagccctacctcagtcttaaccctgaaaatcccactcagaaggcgacggatgaacacccaccctagcattctaatctaatggatcctctcttaacaatcccttccagggatctgggatctttcctggattcgtcggccacacacacctaggctcaaaaatttggacagaaactttgatcctcattggccctcctgccctgtcctaccagcttctctagaagtatgcttctctaattgctccttagagacactatctaagggtatcaacctgtgccaatataattgatctcataaagtgagaagggaaataggcaagagtccagctagcctagaagcagtgtctagggttccttacctgatttatgtctctgatttacctaaatattgacaaatacagattcacctctaggcagtagaaaaacagaaggagaaatcccagttcgtagaggaagaagaaaatgcaatcaatgctgtctagagtcccgcttaagctcagccacagggtactaagtctcttcaggaaaaagcaattgttgtccatcatctgaaaaactgtggcctggaaccatgggcaccgagagtgcacactgcccactagagttccatgcctacatcacggagagatagaatagtctcaaaggattcttaagagtaatgtggggaccaaaaggagatgaatccacagcctctgccttaccgtctgatctaactaatagtatttccagacctttctgtgggctgcaccaggggttgttcagaaagaaaaaaagttgttaatgtcccaccgtttcccgtagcttccgaggtctgtgttgttcataccccaggttccaggttgttctcccactacttccacagaatcagtgtgtctcattccggtacctataatctcatctttattctagtcgccctctacttttttctagacactttatctactagagccaggtaaaatagagacaagaatatttacataaaacttagctggaactaagttggagtcccataactgctactaggctgagatgcaactcagaggatacaaaagccaggcttgcctagaattgcagttatgggaaagaaagtcacatttcacccaggaattattagcacgaaattccaagtttgtgaaatagattcctagatgattcctagatcccccaaacatttcatccttatcttggaggcaatcaggaagagaaaataaaccatacctaatcaacaaattatctaaccagcatgtgtggaaaaggagggaacatcatagagttggcttgttttagtacgtgtggtgaaaaatgccgcgaagtcagagctcaattggtctcaaaagcctaaaagatggcacagattagcttcacgggacacatggtatggatggtgtcggcatactgttatgctgaagatgtcaagagtggtgactgatatctcaagaagtgggccaaaagtccacttctggttactctgcttggtatggtctaggaattcttcaaccatgagacaaataggtcaactttcaccagcaaccccaagtctggtttgcagtattagactctgcgttagacacagatttaggttcaatctgcagcttgattgttgtcactctctagaaaacaaacccttaccatggacttctagatgagtgatccagttagatcagcatctgagattgtctccagtttgcagcccaaaagatattcagacagtctacagtttccattgtagataaccaaacagatagaatatgtgccattatcccaaaccctgagttctgacctttgagaggagcaaccactcatgtcaggttctgtatggctggcacaggttaaacagccacagcagcccagtggacatcatgaggtttcaccttccctgactcatctatgaaccaggaccagtcatataggaaacactcagtaaattgggggccccacagagacagcatctttgcttcagaggatagaaggaggcataaaatttcaaccagctggggatgctctagccctctatgggtgaaactgagtttgtcaggagttctgcagcaagctcttagctgactttcaaatcagtgtaaccagtagtgtgtcactgagtccaaaagcccaaagaacacctctgggaggaggctagtcctttactagaggctccaaatgccaaaatcaagattttcttgacctcaggatgaattgatcaatgcaaatctccccaaatattttcactaaaccttaattggaaagtaagactccagattttttaactctcactaaacataaatatctgattttttcacctgagatctatgtatgtgtgttggagcatgcctttaccaatcagcataaagttacatctctccttgagcctctactttctacttgtgcagagtttaaaatgcagaggtgagagcttagggttttctgggtcttttgctaagcatgtacctgaccttgagcatccccaattccccatttccttcttgatcccaaagaccgttatcacagtcttaattcccagcagcttttcctcctagagctttttgacatgattattcttagacccaactgatatccttcgttcctggtagactgcgtagctcatttccatttaaatgcttttagaaatattaaactatggatttaagatttatctgctttttaaattaagtaatgctgctcttagccttccacaggacttgagggttataaaaaaaaaggaagaaaataattattttataccaatagtatgaaaaagagactgggaatgactatattaatagcagacaaaatagacttaaaaacttaaaagagacaataagacattatatagtcatagattgtccatttggcaggaagatagaaatagtttaaacccatacctaataataaaacattgagatatagaaagcataacttgacagaattaaaggggcaaaaaggcagttctaaaataatagttgaagatgttaatactccactctgagtaatgaatagaaaaatgagatagatgataaattaggaaatagagttcttgaataactcaatgaaccaaattgatctaacagatatatacaatatactccatccaacaaaagagactacacactcttctcaaatgcacatggggatttccccacgatgggctgtgtagtagatctcaaattaaatcaataacagaagaaacgttagaaagtttacaaaactgtataaattaaacaacatacccttaaacaacaaataagtaaaggaagaaatcacagaggaagttggaacatacttacagaggaagaaaaatgaaaacaaaacacatcaaaagttaagggaaacagcaaaaagagtgctaagatgtaaagtttgcagctaaaatgcatttaaaaagaacaaagatttcaaataaataataactttatcacctagtaaattagaaaaataacaccaaattagatgcaaagcaaagagaaagaagaaaatattaaagcttttagcagagataaatgcaatggagattatacaaaccacagaattccaaaaaaccaaaagttcattctcacttcttcaaaaaattaacaattggcaaactttcagctacacacacaaaaaattaacagcatattcacatactaaaatgagaaatgaaagtgggacattactactaattcaaagaattaaaatgtttaaaaaactgtactgtgaactatgataggatgataaattggaaaacgtagataaagtgggcagattcctaggtatacaagacttgattacaaagaaatacaaaatctgaatagatacaaaactactaaggaaatggaatcagtaattaaaagcctcttcataaagaaaagcccttattttgttggcttcactagtgatttagatcaagcatttatagaacaaaaatcctttccaaagtctaccaaaagcctgaagagagcagttccaaacttattccatgaagccaccattagctcataccgaagccagacaaagatactacaaaaacccatagactaatatcccttatgaacacggatgcaaaactagtcagcaacatcctagctaactacattcagcagcatactagcaagattacaacccatgaccaaggggagtttattattggaatgaaaggaagttttagcatatgggtggtttcagtgcagtggtgtttacaaataattgatcacaaccagtatagatttctttattctttttccagtctcactggttcacttagctagcctttcttaacaaaagtttaagcatatgaaaattaatcaatgcatatgccacattgacaaactttttaaaaagtattctctcattaatacagataacgtattttacaaaattcaaaatattttataataaaaacaataaattaggaataaaaggaaaccagctttgtaaaattcacatataaaaacccacagcaaacaacatattccagaggaaaagatcaaaagtgtttcctctaagctccgaagacagagtgaatatctgctcttgctagccacttttattcaacactgtattagaagtttcattcagagaaattaaaaaagacaatgaaataaactgcatcaaaatgtgtacagaaaatatattcttatatgtagaaaatctttaagattccaccaaaaaatattacaactaataaattcagctgaatagtagcatacaaaatcaacatacaaaaacaaactgcattttatgtagtaacatgaataatctgagaagaaaactctgaaaacaattcaatttacaatagtatcaaaagaataaagtagttaggaagtaacgaagaagtaaaatgccaattactcttgtgtagatattaaaaaatcaatttttaagtttatggggaatctcaaagatctttaaattgcaaaaataattttgaaaaaaataccaaagttagacaagtcacacttaatgatttcaagacttactacaaaattccaaaatagcatgctacaaagagactaatggagtaatatagaaggcccatataaataaaccctcatatataaggtcaaatgatttttatgggaaatgaactgcctttacaacaattagtgctggggaaattgggtgcccacatgtaaaagagtgaagctgggcccttaacttctactataagaaaaaattaactaactggatcaaagacctaaatgtaagagctaaaactacaaaattcttagtataaaatgtaggtaaaacacgtcataaggctggatttcgcagtgatttcttttaacaggacaccaaaaatgcaagaaacaaaagaaaaatagataaagaggactctatccagaatatacaaagaacaattcagcaataataaactacttgtttaaaatatgggcaaaatacttaaacagatatttctctaaaaattatgtgaagtggcttataagcccatgaaaaggtactcaacaaaaccttttcattttcattagtaaaatgaaaatctaaccccaaatgacatatcacttaatgcacatcagcataactagtacaaaaagaaaaaaaaaacagaaaatcacaagtgttggtgaggaagtggagcagttagaacccttgtacacttggtggaaatgtaaaatgctgcagctgctataaaacaacaccatagtaacgaaataatttacactcaaaatcaccgtatgatccagcaatttcacatcttggtatgttgcaaaagatgtgaaagcgaagacacaaaataatacacgtacacctaagctcatagcagcatgactcacatcactcaaaaggtttttgaattacctgtgttgtttgaattatcatcaatgaataaatagataaaatgtgatttatacatacagtgggatattattcagttatgaaaaataaggaaattctgacacatggtacgtcatgcatgaaccttaaggacattgtgcaaagtgacatgagccagtcataaaaggacaaatactgtatcattccacttatgagatacttagagtagttaaattctggaaacccacgtagaagagtggttcctaggagctggagggggagtaacagggagctgttatttaatgtgtattgaattttggtttggaagttgaaaaaagatccttatgaatgggaataatagttgcaaaacaatgtgagtgtagttaatttctctgagctgaacacttaaaatagttaagatggttaattttatgtatactttgccaaaatgtaaaaaatattttttaaataaacaaactatagctatctgcaatagcatgaattaatatcataaatataaagttgcctagaagaaagtagatgtaaaagtatacatattatataatttcacttatataaaatccagaaagtgaacacaactgaggttctggtttccagtaataatgaagtagactagttcgttgaataactatttcacagataacaataataaagcttaataaaatactatattttgctatatagaaaggcacactgtttagaagactgaatgaagattttatctatgccactgtggaagagataaggattggggtttgaatctattcaaattaactccctcttaaaataataattttcaaagaaatacaacagaatccagagtccctgtagttcctatcacacaatttaaaaattcatgagatgtgtgaagaagcatgaaagtgtaatcgattcacaagataaaaagcagacaatagaacctattctcaagatgtgcaagatgctgtaatcagtagataagatttgaaagaagctatggtaagtacgttcatgggggtaaaagaaaacagtctcatgacaagtgaacagaagcgtaactgtacatttcatgcgcgtccgtgtgaagagaccaccaaacaggctgtgtgtgagcaacatggctgtttatttcacctgggtgcacgcgggctgcgtccgaaaagagagtcagcgaagggagataagggtggagccgttttataggatttgggtaggtaaaggaaaattacagtcaaagggggtttgttctctggcgggcaggagtgggggtcgcaagatgctcagtgggggtgctttttgagccaggatgagccaggaaaaggactctcacaagataatgtcatcagttaaggcaaggaccggccatttacacttcttttatggtggaatgtcatcagttaaggtggggcagggcatattcacttattttgtgattcttcagttacttcaggccatctgggcgtatacgtgcaagtcacgggggatgcgatggcttggcttggtctcagaggcctgacatacactcccagtcttttggtcacagggctgtgggactgaggagggaaattaaagaaaaataaaattaaaaagaaagagaaataaattttcttgtattgggctgacttgtcccagaggcttcaacaggcacagcccagaaccaggaatagtcttgataatattatctaatgtgctctggaggctctcccaacgctcccccaacatcgggaaaagaaaaacaaatttcctttttttacggaatgagtttatagattcttgttctctgtaactagtgacttcaagtattctgttttatctaagaagtacaatgtaagtcatgagaagcctgagtaggctgaactacagctgtttgggcaccatagtgagggttataggataagcccatgcccagggaaacctagaaaatggacatgtgggttgcttggcaacggtcatgtgcaatcctgtctgtcctgcctctgtatccctgctttcacgccactgtaaacttgcttcaagctagcccaccaccttttgtgaaatgtgcataaaagtcaggttctgtctttgttccgggcccagtctttttgatgtgagttagcttgtcctcagtttcatgggggtccgtgtgaagagaccaccaaacaggcttcgtgtaagcaataaaagcttttaatcacctgggtgcaggcaggctgagtccgaaaagagagtcagcaaacgtagatagggatggggccattttataggatttgggtaggtaaaggaaaaagggggattgttctctggcgggcaggagtgggggggtcacaaggtactcagtcggggagcttttgagccaggatgagccaggagaaggaatttcacaagacaatgtcatcagttaaggcaggaacaggccattttcacttcttttgtggtggaatgtcatcagttaaaacaagaaccggccatctggatgtgtacgtgcaggtcacagaaggtacgatggcttagcttaggctcagaggcctgacactgagtgcactcaataaaaattctcctgtttcaacccggggtctctctcatcctcctgaatcccgcaacgggagaattccagcatgcaccaggttcacgggacagtgcgcggtcactgaaagaagagtggggcggggagggtggtgtgcggctgtgagcacctcttgtgcttgctgggagatgtagtcttataaagactcccagccctttggtcacagggctgcagcaccccaattccagcatacaccggaatcagagacagtgcgcgccggcagaggaagaggtagagctgtgcgtgactcgctgggcttgatggaaaatgtaatctcatgaacactccttaatgaacagtgcgcctcactggaggaaaaggcggggctgtgcaggccttgctttgcttgctgagagatgctgtctcataaacactcccagccctttggtcacagggctgcaggactacattcccatcatgcaccgggatcagggatagtgcatgtgcctgggtgaagagacacagttttgcgcgcctcctttggcttcctgggagatgtagtttcataaagacacccagacttttcattacagggcagcaggactacaatcccagtatgcaccaagatcaaggatagtgcgcgtaactgcagaatgaggcgggattgtgcacgcctcgctggacttggtgggatatgtattctcataaacatacccaaccctttggtcatagggcgggaagactacaatcccagcatgcacctggctaagagacagtgcctgtcactggaggaagaggcggaagactacaatcccagccagcaccgggctcagggaaattgtgcgtcagtggaggaagaggcggggttgtgtgctactcgccaggcttgctgggagttgtattctcataaaacctcccagccctttcatcacaggcctgaaggactacacttccagccccagcatgcactgggctcagggacagcgcgcgtcactggaggaagagggagggctttgcgcttctagctgtgattttttgggagatgtagtctcattaacgctcccagccctttggtcacagagatccaggactgcaatcccaacatgcacccagctcagggatagtgcgctaatcactgcaggaagaggcagggctgtgtgcacctcctgggcgtactgggagatgtattctcataaacactcccatccctttggtcataaggctgcaggactacaatcctagcatgcacccagctcagtgacagtgcgctagtctaaggagaaagaggcagggcagtgtgcgccttgctgggcttcctgggagatgtagtcccatggcctctccctgccctatggtcacagtgctataagactacaatcccagcatgcacggggctcagggagagtccacatcactgcagaaagaggggcaggttgtgcgcacctcgctgcgtttgctgggagatgttgtttcataaagactctcagaccttttgtcacagggctacaggactacaatcccaggatgcatcgggatcaaagcagtatgcgacacggggaaaagatgcggagctgtgtgcgtctccctaggtcttctgggagatgtggtctcttggccctttggtcacagggctgcaggactacaatgccagcatgcagcgggttcatggacagtgtgtatcactggaggaagacgtggagctgtgcgtgcctcgctgggcttgcagggagatgcagtctcataactaccccagtcgtttggtcgcagggctgcagcagtacaatttcagcatatctctggctcagggagagtgcactagtcactggaggaagaggtaggtctgtgcgcacctctctgggcttgctgggagaggtagtctcataaacactaccagccctttcatcacatcgctgtaggactacaattccagcatgcacggggcgccggggcagtccgcctcactggaggaagagaaaggcgtgtgagcgccttgctgggctttctgggagatgttgtctctttatttctcccagccctttggtcacagggcttcaggactacaatcccagcatgcatcctgctcagggacaacgcgcgtcactgtaggaagaggtggacctgtgctgttctcgctatgctttttgggatacgtattctcgtaaacactcccagccctttggtcactgggctgcatcactacaatcccagcatacatcgggatcagggagagtgcgctaatcagtggagaaaggggcgaggctctgcacacctcgctggtcttgctgggagatgcagtctcataaacactcccagccctttggtcactgggctgcagcgctacaatcctagcatggaccgggcgcagggaatgtgcgcgtcactggaggaagaggcagggttgtgcacgcctctctgggcttggtgggagttgcagtctcataaacactcccagacctctcatcaccgggctgcaggactacaatcccagcatgcacccggctcagggagagtgcgcattactggaggaaaagtctaggatgtggatgcctccttctgcttgctgggagatgtagtttcataaagactaccagaacttgtgtcacagggctgcaggactaccatcccattatgcactggggtcagggacacggcccgtcagtggagaaagaggcggggctgtgtgcgtctccctcggcttgctgggagatgtattcttataaacactcccagccctttggtcaaagggctacaggactacaatcccagcatgtgccagtctcgggggcgaggtacaggcctggaagaaggggccgagtggtacacgccctacctaatatgctgggagctgtagtctgttaactgctctcagcctgtttgtcggtaggcttcagaactataatcacagcatgtaccgggacccggggtgcatagccctggagggaggggcagagcggtgtggacttcccggtgtccaaagcactgctgagttcttatgctatgccgactctttgccaaggagaatgagtacataggtggacctagaggacaggtctgcgctgagcattgaggagggtattaccctacataggcaccttacctttgcccaaatcgggcgggttgtcctcaactgattggccctatccttctcaagttcctctttcagctgcacccagggttcttcccagagcattgcgccttctgcagcccagggcgctgccttctttcctaaactgctgtggaaactgtcctgatgtctgagacactgtccattgtgccgcagccctcttttttctctagccaagcctcatgctcaacagcttttgagagaaatcttccacgtggcctgcttatgaacagcttcagaattctgtagggggtgacaaggtctgtggcttcctggaaatgtcactgtcaatggcgcctttttcacgaatgtgaaagttgaggcatcaggaaggttaattattgggttgcacaaaatctgctaagagcaaaggagaaaaccccatttccgaggcatgagtcttgtgagccattttcatcaacccatttaagtggacaagctccaaaatgaaacctgaagctgctgactatttaggcattttacacttgaaatcatcggtctcatctcaagtcactcctgacttgccagtgtctcagaaacacaaatgggaccggatccctcaggagcagatagtgttccagctttgttggagcgacatttaagatgtggagcacttggggtcgtttgaaacccgctatcttcagtagggacttttacttctagagaacatgtgcattttgattttatctgtcctcaaactgaacttttgctcattttaatagtaaaaacacattcctaggtggagacttaagatgctaatgagacatgcaatgtatgcacaaatatgtacagttagtgcacatgtgcacccagaagaccactcaaaacatgcttacactaacacttctttccaccttcttatgaataatcgtgcaaaacccccagaaggagggtttctccagtaacaattaatggtgtctcactcttatgagcagcctgccctggaatctctttctcagaatgtaccgtctattctgcacttaattttcaaagtagtcttttctttttttgtgtgcaataaattactctatgctgtacttcttttgctgtgtgtttcttgtttgaattcttttaaactaagaaaataagaatcaaggtattacatcagccatcaacatttcttttgccatggcctggagagaggtctgtccgcttcactgatttcactttccctttacttgccgtgaatactgtggcacttccagactacctggttaactatcgctggttcttccagcactgtttcactaaagttctggggaaaccctgtccctttaggctttatgcatttcccagctccttgaaattgttcttcaacaggctttctttgctgaacaaaagatgcacagtcatggataggcccagtcatagggattgaatctgagcattgcaggtgttataattgggcatcataaatggcaaaccactgaattagggaaaggcttgtcagccagacatctgccccccagcgagcagtgggggtcatctcggcagggctggagatgtccagcgctggtgagagctaggacggtgcatggcaaatgcctatgacctcctagagcttcagttaatggggtttcaaggggatgagttggacaacttggtggttccacttggctcatggggctgcccacagcctcctggactttagtacatgttctgtcgtttgcaggattctctcggcaccatgggaatcacttcctctactgtcactgaaacacacctgggatgtatatttaaaaattgaaacagcttttggctaaatgaagcaaaaaaacaattatcttcttttgtaaaactatttagcctgcatacagattagctgacaaaacatggctggagaatgagactgtgaaatttaacaccatcatacagctagatcttttctgtagtaatcagggaaaatggtctgaagtatcctatgtgcaagactttctggcccgacaacaaaacccagctccatgcagcacctgtgggctaaagcctagtaagccacaaagcccctcagatccagtagaagatcatttgttttatggacaagtgaccccagaccccacagcctaataccagctccagataggggccctcagaggcctacacctgctttagaatccccagcgtccccacactatcagagtcttctgtagaatctaagcttgtttcacctcctccttatgctcctctatcagcctttgccagttacaatagagaccagtccagctgcagttactcacagtggagcttcacaccatgcagggccagagaatttgatccgcttacagaaagtctcaaatggagagaggaccatcagagtgcttcttctcttcccagtaaatgatctaatccaatgtaagcaacagctctgatggctctcagacaacttcagcgcgtttactgaagccttccagtctctaactttgaccaccattcaactttaccatccataaatggacccaatgactgctgccaactcagctgcacaaaactttttcttatttgcgaaaaatagaaaagacttaaaacttttgctgctttcaccattttaaagcagaatacttttgcagcacaaatgtcaccataaggtggagccttgggaatccagtataaactatctcagaaaatctcagtgtgtccccaacaggcagcagagggcctcaatagacttcaacaacatctggactccatggccactgcattccaacaaaatcaaagagcctgggatcttctcccagccaagcaaagaggaacatgtttatatctaaaagaagaatgctgttttttgagatcaatcattctggtttattccaagaaaatattaataatatcatcacccaggcagacaaaattgaatctctaggaacttccatgggaacatgaaagcaatgtccattgcctgccttgctctctttaatagtacccgtcattattatattttcaacttctacttttgttccaattttgtttaaaatgttaactgatttcctgctatgttgcttgtggcagctccatgtttgcatgatggtttgcaaggctttcaatctttggctgccaacatcttcccactggttccacgaatgacatggtttacaccctgttagatcacacaggaagaaactttaaggcccaggctaggcagaagtaacacccactcagcaggaaacagctccagaaaaagtggtctaacccctcaacctccaatatggttattgccctaaaatctcttagggggaaattgaggcagaatagatagtacagaaaatgaccatgatctcaggatacagaaaccatggtgactgtacagccaacacaataagccgtagcattcgcattgtaattgggcttattcgagcaaagctatcctcattaaggactttctgttctagagagcatgtgtattttgatttcacctgccctcaaacttaaattttgcttattttaatagcaaacaatgcaccccctagccaggcacggtggcttatacctctactctcagcactttgggaggctgaggaagatggatcacttcaaactagaagctcgagactaaactggccaacatagagaaaccccgtctaaattaaaaatacaaaaattagcagggtatgatggtgcatgcctgtaatcccagatactcaggaggcagaggcacgagcatggcttgaactcaggaggcagaggttgcagtgagcagagatcacaccactgcaccccagcttgggcaacacggcgagactctgtctcaaacaaacaaacaaacaaacacacagaaatacactcctgggtggaaatataagatgctaacgagacatgcaacatatgaacaagcatgtacagctactgcgcatatgcacccagaataccacagagaacatgtttactagcaactcctcttccctcctccttattaataataatgtaaaactgccataaaggggtttctccagcgacagtccacgctgtctcactcttatgagcagtcagccctggagtatctctctcagggtgtactgtattctgcacttaactttcaaatattttcttttccaataaattatgctgtactttttttctttgtgtctcttgtttaaattcttaaaatctaggaagacaagaacagaggtatcacatcagttgtcaacacagcaataagtcagcctccttcttgtaagcatagcccatgcagaaaaggagagtcgcatcacctcggtgctggatccagaggtatgtcacaatttatcccatgcacaaagttaaggtcattgaggagagtcgtattaaataatttctgggcccagggatttgtcacaacagctcctgtgagaagagatcaggcagcataatcacataaccggtgtgctggacacagcgataagccacctttcatctgtgggcatgacccaggcaagaaagaagagtcacggcatttaggtgcttgctgcagaggtacgtaacaatctctcttatgggcaaagctcaggtaagagagaagagtcaaatatccaaggtgattcatgtagaaatttgtcacaagagactttttaggcagggcccatgttggatcttcttatcttccagaagttaggtacagggatatgtcagaatacccaaaatacacagggctcagtcaataaagaagagccacatcacccaggtgctgggtctagacatatgtcacatctcttttatggggaaagctcaggtaaaaaaggaaggtcatatcaaatagttgatagacccagagatatgtcacattgcctcctgcttgaagtgtctaggccaaagactcacatcacattggtgctaggcctgtgttcatatataaacattcaaccagagttaaaatggtggcccacatctaaactcagctcataggcaagggatgagtctcctatcctgacatagttaattgtaatgatgttgactctcatccctgggcctaatgctacaagtatgatcatgggtccctaccattaggaaggtctcaaagttgattacgactctcatgcatactgtatagggccattgggtagtacacagagcgtgctaactgggccgagcacacaggtgagattgtcacactcatatgcacacccagccaacagtaactattgtcatcctctcacgggaacacaggtcagtctgcagaggaattgaggctgtcatgcgcaaatccagtctggtgttgagatggttactcttgggcttagacccaacatacaggaggtgttgaatgtcatgcctaccactgagacagctgtgggattgttaatctaattcctggaccattctgcagcttccattgtgaaatttcccagtgcctagcacctaagtgacttgacgggctcgcatggacccagcccacagatgggatattaacatattgctggatccagcacattgaggatgtaactctattctccttccttggcactgcccacagtgagcagtttgacatatcgctagaccttacacccaggtgatgtgagtctcctcttctgccttggcgctgccctcaggaagcgttgttatatatagcttggcctcgcatccaggttatgtgactctccggcttgtgcactgcccatatgggacactgtgttaatattgctgggtccactactcaggctatgtaacccaacagcctgggccctgccttacaggggcattgtgacatatctctgtgctcatcagccaggtgatgtgattctcttctcctgcctggtccctttacacagaagggattgtgacacgttgctgggcttagcaccaagttgatgttgatgtgaatcttctgcctggatcgagttcacagaaggcatcgtgacatacttctgggtgcatcacctatttgatgcaactctcctctcttaccagagcattgcccataagagagattgtgacatatccctgggtctagcactgggatgatgtgaattctccctgcctggggcatgcccacagaaggaagtgtgacttataactgggcacagcacaggggtgatgtgattcttctgcctggtccctacctacaggagtcattgtcaaatgtctctgggcccatcatctagactatgtgactctctacttcttcctagggcctgctcacataaggattgtgacatattacatgcccttcatcatgtgacttttctctcatgtctgggctctgtcttggagatgaatgtgacacatagctaggcctagcccctaggttctgtaacttctcgtttttcaaaatcctacccaccaggggcattgaaacatctctctgggcacttcacttaggtaatgttgccctgttgcctggagcctcccctctggggggtatggtgacatattgctggacacagtacctatgtgatattctctcctttcttgcctgggccttgtatacattatgtattctaatatatggctgggttcaatgactaggtgatgcaactcttatgcatagaccctacccacagggacattatgacatttctttagctctgactctcctctttttccttagccctgccaaaaagggaggtggtgacatataactggacctagcaaccagctaatatgagtctcctcttttgcctgcacccagcatattttaggtgttgtatcatatcctttgtctcaacacctgcaggatgaaaggctcctgcctgagcccagccatctgtcaaaattgtcattctcccacacgaacatggaccataattgaggttctgaaactcacacccagaggcagtcaaaagttggaaaattggctcttaaaagtggatgttgtccttaagtgggtttgtgactccctgaccaagatccaaaacacttgtgaggctgtgaatccactaagataactccgttttcaaaagggattaaggctctcatggaaaaaacccattcctccattgagattgtgacttatgcacatagatgcaacatacaggaggcgttcactctcatacccagaaccggaacttatgtgggattgttaatctcatccatggaccttcctgcaggtgtgattctgacgtacacctctagccagctcctgagtgatttgacatttttgcctgggtgtagcccacagatgagattgtgatatatccttgaatccagcatctaattaatatgcttctattctcctgtcttggcactgcccataatgggtatcctgacctaacactggtcctggcactttgttatgtgactctgtcctgtgctttgcccacatgagccattgtgacatattgctgggtccaacacccaggtgatgtaactcttgtctagactttgcctacagggggcattgtgacatatctctacactgaccacccaggtgatggcactcacttctcctgactgctacctgtttatagcagggattgttacaaatcgttgcgggcagactctaggtaatgtgactgtctttttacagagtgctacccacaggagccattgcaaaatatctgtgggcctctcacctaaatgtagtgactctttgcctgggctcatttctcaggggtattgtgacatatggctgacctcagcaccgaggtgaactgagtttcttctactgtagggctctgaccaaagagagattacaatgtatcaccgggcccagcacctgagctatttgactgtccgctcttggctgcgccctacatttattgtgtattgtgacatatcactgggtccaacacgtaggtaaggtgactcacctgcatgggccatttccccatgggtactatgaagtattttttgttcatcacttaggtgatgcaactctcctctttgccttgggccccacataatttagctattgtgatgtatcactgtgcgaatcacctagtcaataggaagcttctaccaagaccctgactactgagggccttgtgacatagctctgcatttatcacctagaaaatatgatccccccccatttctgcctgaaccctgctcacaagaaaaattgtagcatatttctgggcccagcaaacaggtgatgtgtttcacctgcctgtgcttagttcacagggaaaattgtgacatatcactgggcccagaacccaggtgaggtgactctgctgcatgtgtcgtgctttcaggagggaacaagaacatatccctggcagaactcttagggatgtgactctcttgccttgtccctgtcctcagggaagactgcaacatgtccctgacacagacccaggtgatgagactgtcctgcttctgactacccaaatgtgagattgtcacatatattttggcttagcatgtaggtgtgacgatgacattcataccttaaaccaaccaatagcagagatactttctctcacagccaggcttaacaaaacttgcaaaattatgggtcttctcttactatgaaggtcagagaaagtaagcactcttgcatatcctgtaaagcactcagatggtacagtgtcatcacagggcccagaacacaggtgagattgtgttctctgtgtgcacacccaccaatcatcagaattctcattcctacacaggaacagaggtgattagggaggtctaaacctcatacctgaatgccgtccacagttggaattgtaactatcatttgtgaacatccagtcacagtggggatagtgacttatttctgaacccagtttacagccaagtaaagatcctcttatctggatccagccagctggagagatgttgactctcatacctggacttatggccacaggtatgatcataggttcatatcagcatgaagacctcagagtggattatgtttaatgcatactctacaaggcccacaggaggtacatagtgtcctaacagggcccagcaaacaggtgagattctaacactcatgcacactctggtgacaataaaagttgccatcctcaaaaatgggcacaaccggcgtggctcagtggctcacacctgtaatcgcagcactttgggaagccgaggcggacagatcatgagatcaggagatcaagaccatcctggccaacatggtgaaaccacgtctctctactatttatgattatgattatgattatgattatgattatgattatgattattattttgagacagagtcttgctctgtcacccagactggagtgcagtggcaccatctaggcttactgcaacatccgcctcccgggttcaaacaattctcttgtttcagcttcccgagtagcagggagtacaggctcatgccaccattcccagctaatttttgtgtttttagtggagacggggtttcaccatattgattaggctggtctcaaactcctgacctcaggtgatccacccaactcgacctcccaaagtgctgggattacaggcatgggacactgtgcctgtccaccccatctctactaaaaatacaaaaattagctgagcgtcatggcacatacctgcaatcccagctactcgggaagctgaggcaagagagttgcttgaacccaggaggcagaggtttcagagagccgagatcgccccactgcactccagcctggcgatagagtgagactccgtctcaagggaccgaaagaagaaagaaagaaagaaagaaagaaagaaagaaagaaagaaagaaagaaagaaagaaagaaagagagagagagagaaagaaagaaagaaaggaaggaaggaaggaaggaaggaaggaaggaaggaaaagaaagaaagaaagaaagagaaagaaagaaaggaaaagaaagaatgaaagaagaaagaaagagaaagaaggaaggaaggaagaaagaaagaaaaagaaagaaagaaagaagaaagaaagaaaaaagaaagaaagaaagaaagaaagaaagaaagaaagaaagaaagaaagaaagaaagaaagagaaaattgactctcatatatggatcttgtccacaggtaggtgggtgactctcaaaccaaaattcattacatctgtgagactgtaactctcctaaggggagaagttcttctcagccagagaagactcatttatgaatccagttcactgttgagattgggactgttgtacctaggccaaacatacaaattctcatacctggaatccggacatgtgtggagttgttcatctcatccctgtcgctttctgcaggtgggattgtgacatacatctctgcccagctcctgagtgttttagctctgtttcctgtgtccagctcacagatgggattctgatatatcactgaagccagcacctaaatgatgtgactcttatctcctgccttggtgctgcccacaggggacattgggacatatcacttggccttgcacctaggtaatgtatgttttctgccttgcattagtgctactcacaggggtgttgtgatgtattgctgggtcccacatccatgttatgtgactcttctgcctgtgcccagtccacaatggccattttgacatattgttgcatccaaaacctagatgatttacctctccttcctgagctttgcctaaggggacattgtgaaatatctatgagcccatcacccatgtggcgtgattttcttctcctgcctagtccctgcttaaagaaaggattgtgacatatcactgtgcccagcacctatctcatgttactcttcttttgttttttaggatttgtttggaaggagattgtgatacattggtgggtccaacttctcagtgacattactctgttgactgtgctctgcaagcagaaagcactgtgacacattattgggcccaacaccaaggtgagtctcctgcctgaagcctgcctacagcaatttgtaacatatggcattgggacatatctctgagcccatcaactatttgacaagattctccttttttaacaaaggctttgcccataggagagattgtgacataattctgagccctgaaaataggggatatttcttttgttttctgcttgagccccacattgtgatgtatttctcctcccaacaactgagggaagggaaagtcctgcctgggtcttgcctatggggagccttgtgaaatctttccgtgttcatcaccttaaatatgtgaccctcatcttctgccatggccatgtttacagaagggagagtgggttattcctagacccagcacacaggtcatgtgattctgcatcctggtgtctccagaggggtcattttgacatatctctagactcatcaactagataatgtaatgctcctcttccccctgaaacctatccatagtggagattgtgaaatacagcctggcacagcacctacatgatggtactctcttctcatgcttgggtgctggccacaggggtgattaagacttatagctgggtacagtcttcaggtgatgtaactctcctctatttttgggcccacacacacagggaactaccatatagctctgctcctcagtcttaggtgatgtgactctgctgtctgttacctcctcttagggggaattgtgatatattgctgggcccagaaccgaggtgatgtggccttttctcttgcctgggccctgcatacatggtgtacagtaacatatatctgggttgaacacataggtgatgtgactcttctgcataggtcttgccaacaggggtattatgacatactcttctattcattgcctaggcgatgtgactctccactcttacctgggcccttccaaaagaggggattgtgacatatcactgaccctaacaccaaggtaatgtgactgttctcttttgcctgggtttgcatattttgggtattgtgacatatccctgggcccaacacttagggaataagaggtttattcctctaccttacgtgcagtgaagcttgtgacatatttctgcattcatcaccaagaagatgtgactcttctgcctgcatcctgaccacagagaggattgtgaaatattgctagatccagcatgcaggtgatgtgtctctgctgcctcgttcctaatgtgaggagtggattgcaacataccaatgcctgaacattcaggtaatgtgactgttgactggtccctgtcctcagggaagcgacatatcactgacccagcatccaactgattttactctcctgctctcttcctatatgcaggtgtaattgttacatatatcttggaacacaacacacaggtgcaatgatgacattcatatgtcaaaccagccaatagaagagatactgcttctcctagctacacttagggaaatgaaaaaaaaccctgggtctcctcgctaagatcatccactctctcatatattacagaaagtcctcaggtggtagagagtcttatcacagggcccagcacacaggtgaaatttgttactcctatgcgcaccctgaaccctcctgaccattatgattttcaccctcacatataaacagaacccactggtgaggtcctgaatttcacacatgaatgcagtttatagttggaattgcgaatctcatatgtaaagatctggccagagttggaatgggaacttcgttataaacccagcgcatagaaagctgatgactctcttatctggaccccgccaattgtaaagatgttgactcatatataggcttagggccacaggtttgatcatgggtccataccagcatgaaaatctctgaaagaattgagactgtcatgcatacaacataaagccgtcaggtgcaacacagaaagtcctaatagggctcagcacacagtaatataatgacattgggatgcacacccagccaacattaaagattgtcgttctttcacatgatcatagttcacttttgaggctctgaatcccatacccaaaggcagattgaaaagttgaaaaattgactctcatatttgagagtcacagatgtgttgatgactctcagatcatgagtcagcacacctaggaagctgtgatttcaattaggggacaaagtacgcaagagaaaatggggctgccatgcacaaatttagtccactattgagatagtgacttgtgtacttagatcaaacatacagaaggtgttcactctcatgcataaaaccagaatatgtgcgggattcatcccatatctggactttcctgcaggtgtcattgtgacaagcatacacatttgtccagcacctgagtgattagactcttctgtttaagcccagctcacaaataaaattgggacatatcattggacctagaacataggtgatgtggctctattctcttgacttcgtgctgcccacagggagcattgtaacgtatcactgaacttaacacctaggagattagaggctcctgcctgaactctgtccacagtgagccttgtagcatatttctgcttccaacaccagatgatgtgactctcctttctgcctgcaccttgcccacaggaaagattctgacatatcactgggcccagtaatcagtaatcaggtgatgtttctctcctgctatggccttgcccacagggagtgtggtgacatatcactgagctcaatattcaggtgatttgactctgctgcttgtactctgatttcaggaggggattgtaacatatcccctgtgagcacacaagtgatgggactcccctcctagcctctgacctcagaaaacattgttacatatccctggcccagccttaggtatgtgactctcctacctgttccctgccatcagggaagatattgacagatctcaggccaagcatcccggtgacgtgactctcctgctcactcccttcccacagaagagattgaaacatatatcttggccagctcacaggtgtaataatgactctcatacctcaaacctgccactaagagaaatactgtttttcatagggaggctttggaaaaccggtaggtcttaactcttcgttttgtatgaaggtcttagaggaatacaactctctcatattatataaagctcttaaatggtacaaagagtgttatcacagggatatgttgcataacctatgggaggggcccagttatatgtcacaattaacccagggggcagggcacaggcatgaaaagagagtcacaccacatatgtgctggcctaagtgatacatcatcatccccactgtggacaggtcgcagtaagaacaggagagtcacatcattctaataatggtctcagagatacatcacaatgactcccctgggcagaaacaagggataaggttcacatcacctgtgggctaggcccagagatgtcactcttacttctgtgggcatgtctcaggctggagaggagaatcacattacctaagcactggaccaagaaatacttcacaatctttctcatggcgaaagcccaggtaagagaatagagccatatcaaatagttcatgggctcagagatatgtcacaatgctccctgtgggcagggttcaggtaggacaatcacattaccttggtgcttgttcagcaatatatcccaaagccttctgagggcagagccaagataaaagagtaaaatcattttggtgttttacaaatcgatatgtcacaatctcccccgagggcagaacctgaaaaaagggaagagtcacattagctaaatgctgcgccgggtgataagtcacaattcaccctgtaggcagagactagacagaagatagagtcacatcatctagtggctggtgcagagatatgccaccatgccctctctaggcagagttcagacaggagagttatgtcacctgtgttttggacccagaaatatgtcacaaaagcccatggacagagcacaggaaagacaggcacataacctgaatatcagcttcagtggtatgacccaatgcctcctgtgagcgttccaaggcaggagaggagactcacattacctgtgtgcaaggcccagtgatacgtcacacggaggagtaccactgtcttgcatattgtgtaaactatggtagagaaattgtcaccacagggctcgccacactggtgagattatacttctcagatgcacaccacaccaatattcaggatggtctctatcacacgtggagagagcccactcttgaggtcctgaattacacatgcagacacagtccacaactgggattgtgactttcatatgtgaacatccagccacaggtgggatggtgactcatttttaaacgcagctcataggcagttaagaactcttatttggacccatccaagtagaaagatgttgactgtcataccagggcttaaagctaaaggtacaaggaggggtccgtgcctgcttaaggtttcagagagaattgttacactcatgcatactctataaaggctgcatatggtgaagagagtgtcctgacagggcccagaacaaaagtagattgtgacactcatatctacgctgagccaagagtaaaaattgtcatcttttcacatgaacacagcccattgttgaggttccaaatctcacacctggaggcggttgagagatgaataattgactctcataagtggatgcgatccatgtttgagtcagtgactctaaaaccaacattcagcaaacacgtgaggctgtgactccattaaggggccacggtcctcgggaaagactgaagctgccatgcacagatccagtgcaccattgagactgtgacttctacacttagacccaacaaacacaatgtgtttgctctcacacctagatatgggacatgtgcaggattgtcagtctcagccctggactttcctggaggtataactgtgaaatatatctcggcccagctcgtgagtgacttgactcttctgcgtagcccagcccatgataaaattgtgacattattgaacccagcacctatgacccccctcttctgcctgggtcctgtcaaaaagagagattgtaacaaatcactgggacaagcacccacatgatgtgactctcctcttttccctgggccctgcatattttgtatattgtgacatactgctgggcataatacctagggaattgatggctactgcctgagccctgttcacagggggccttgggacatctctctgcattcaccacctaaaaaaagtgtgtgcaccctgcctacaaagaagattgtagcagatcacttgtcttagcaaccaagtgatgcgagtctcctgtcctgccttggtgctgctcacaggggacattataacatatacttggtgctgcacccatgttttgtaatttttctgccaggggtctaccatataagctatattgctgggtccaacacccaggttatgcagctctcctttctgtgctctgcctacaggggacattgtgacttatctctgcacccatcactcaggtgatgtgacttgcttctgctgactgattcctgttcaagtggagattgtgacatatcaatggtggcaccatctagctgatgtaactattctcttctgcctaggttcttcctgcagtggaaattgtgatgtatcactgggcttaacaccaaagtgacattaattttttgccttggttcttccctcagaagacattgtaatatattgctgggctcagcaccaaaacgatgtggatttcctgtctggaccctgcatacaggagtccctgtgacatatctcttgactcatcaactatttgatgtgactctcctctgttccctgagctttgcctataggaaagcgtcagcctggactccagagtcagccacccacccctgcacagacaaggagaggtctcattaagcttcagcacagtctgggaccatagctttttttgtaacgatttgttcggcatgaggcccactcacaagggcccttcgtgactggactcaaggaaaacgaaaaggcctacttgtttttgcgattttctgttgtttttcaataactatttctcagaaacagtgctggatgaattccacaaggggttcacacaacctgttccaggacttagtgaccattgtttctgtccatgttcattgagttcaaatttaatatttaacttttcctcctcattcagcctcaatttgacactgaatcataggaaaatatttttacagttatacggggaagtcacaactggtatagattacagatagagcagaggagaattaaaagcacaattaatagaaaccacacccaccacggccaacgccaatgctagtttgacagccagtccatgatggggtcctgatggttagattctaactgttttacttgtccttgcatgtcttcggcaaggagagtaatactgcgagaactgtcagggatacacacaacattcagaatgcagcaagactcaaacccctccttgggctgcggtaaacatacctaatgccattcgattttgcaacacaacagtacacagctgaacaagttcttctgataacaacagaagtccagtgctactatcttaggagcttttactatatgtggacttaatattttaatttgttgctgaagcaggattgtacgaggggcaagggagaatactgtgatagttttccaccaccagggagtctggcacgttcataaccagctacctttgtaagcatctagattattggggaagggaatattatcccggatggtgaatggaattaatggcacccccaagtgaatctccccatccaataagggggcagataggccacccatagggtctgcatacccagagggccccccaggggacagcaatggttatactacaattatagtgtattaagatgttattaaagtagcaaaggaagtccaggttggattgcaagtgttgttgttttggccccatttgtagtgacagagccattcagaaatattggcaaggacaactctgcaaggcagtccatttcctgtggcctctggcaatttgatgcatagccagcattgactgcggttagcttctgtcgcagtggttgctgcccagttgatgaattcactctccacctcagacctgatgacccaggtactgattactagtagacaggttattctctgtaacaacaaaactgaaggggaacataatattgtttttcatttttaggaaactgtactacccttttattttctgctcccatacctacaaggtcacagccttaggggcgggatctgatggaggctgtatccatattttcgttccaggatttaagctacctataccagtggatcttaatttcccagttctgtacgtagcctctgttggggcagagatttcctcaggggttaattgttaacaaggtaccaggtaccactgacaattgagcaacccgaatctgcggtcttgtaacaaaagaatgtggagtggtattgtgtaaagtgaactttaactgttcctggtaatcattatcaattataccaccatacattataatgtgtctcatcgccaggcttgaatgtgttgtaatccattcacccacattcaagtttgcatttatgctggaaattttggcctgttgatctacctgctgtttagtctgtcaagagaatgcagagatgcatgagaatcaatatgaaaaacagcaataatagtaatgtgcatcaggattcaggtatcttcctagtattgttttctccaaacctctttattcattattcactatttgtttcattgccattcgggcaactaggtagtaagaccattttctgctgaccaacagtcggtatacaagcaacaaattgctctggcctcctcctgaatagttcggaggatggcttctagttcagccagctggctgctcacacccctcccttcatcagaaacgcttatgtttttaacaggattataagccacggcctcccagcatcaggtcccatcaatgtatttggtggaactatcagtaaccaagcgtgtttctgatcctctgggcttagttctttaaaggatttgccccattgggcaggggaggtttccttccctatatgcaggacttgccctgtggtttcctgagttggcaagttttgcacatcttcaagtaaaaatgataccgcttttagttctggcttatcctggtcttgtatgtaccatttccattttatgatactacattcttgagtgtaccctatccaatgggttttgagggagctcatgacccaagtcataataggaatttggggcctcataaaaacatcatgattaaaacaaaggtgttctgcttccttcaagcgcagtagaaggccaacagctgcttctcaaagagtataagctttgccagcctctggcagcttctgggtctaaaactccaaaggtatcttcttcccatcttgtttctacctaaggctccaattagcatgttgatgtaggacagttacttgcagttctgttgactcatcctataagggccatagatccagggccagttgctcagcttgttttgcttgttgaaaagccaggctgtctttctctctccagtgatattcatagtgttttctagtgactgcatgcagaggttgtaatatgttacccaagtggggaatatgatgtctccagaatccaaacaagccaatacaattttggacctccttttcagtggtagggctgcaaattctagtattttagcgttagcctttggtaaaatggactgtttccctgcagtccataggatgccaaggaactttacactttgtgcaggccattgaattttattagagttaacttcccatccttgagataggatttgggtttttaccctcttctgccctgaaaactgactagttattcagttttaccctgactgggcaactcggacagctgctttttcagcaataggctgatagctttgagcctgatcagtcaagacaggcctggcatggtaccagggtcagtctggaagtcagattaaaattttccttttccagcttacatttctcttgtaacaaccagtccctacattgacactttaacttataagaagtaagcaagcatcatcaatgctgggaaattccctcagcattacaattaccaactgggactccctgctgcacctcacgcacagccagtgattcaaacaaactttatcccacttaaatggcaatgcagatataataagcaaatatataagcaagttgcaatgggacggggagaagggaaaagatatatatatatatttaaactcaccaaactatggaggattcaccacaagactgtgaagcaacagcctgggctccagattggccactcatccgtccacagacaacgtgagatctcatgaagctttggcgcagtctggaaccccagctctttttgtaatgagttatttggcatgaagtccggtcaggaaggctattcacaacggggctcaaggaacacaaaaaggtcaacttgtttttttgattgtctattgtttttcaataactaagatataggaataaattgaaatagagatttatctgaaacagcgctggatgagggcttcaaggggctcacacaacctgttccgggacttggtgaccattgtttgagtccatgtccaatttagttcaaatttaatatttaccttttactccaaaaagtgtcaaaagtaattccttcaaatgcaggaaattatgtagctactcacaaactaaacttctcaaacaaaagtcataaatagagtacagagataaaaaataaaataaaatctaactacatctgtctacaggggattcaatttatttatttatttatttattttagagacatggtattgctttgtttcccaggctggtctcaaacttctgggctcaagttaacctcccacctcaatctcctaaaatgctcggatgacagatatgagccatcttactatatagtaacaaaaacagactaaaagtggcaagatgcatcaaaacaattttatgcaaatcgtaatgaaatgaagacaacgtcacgagcacattatgcaaaatactttttaaataactgtcttagtttataaaataaattataagttaaaactgtcaaagaaaacaaaggacaaaataataaaaaagtttattcactggaaacctaggaaaattatatacatttatataatatacatttatataattgtgtgtatttatctaattatgtatacagacacacatatatatgaacctcacatgaagattttaaaataaatcaataatattttgtcagaacataaacaaaaaactgcaatatactgagaacaatattttaatacaccagttctgtaattaataataaagccagagagaatgttaagaagaaaacagaggacatgaaaatactgtaaaacagttagatgtaacagatgcatagagatcactctacacaacaacaaaactcacagtcttgtcaaaagctcataaaacattgtcctaaaaataaatataaggaaaaaaattttttaacagaattaaaaaaaattgaatgttacagaaaacacttcaaaaaatcaatcaacccaggagccggttttttgaaaagattaacaaaatagatagaccactagtaagacaaataaaggagaaaagagagaagaatcaaagagacgcaataaaaaacgacaaaggggatatcaccacgaaacccacagaaatacaaactaccatcagagaatactataaacacctctacggaaataaagtggaaaacctagaagaaattgataaattcctggaaacatccacacctccaagactaaacgaggaagaagttgaatctctgagtagaccaatagcaggttctgaaattgaggcaataattaatagcttatgaaccaaaaaaagtccatgaccagacgaattcacaacggaattctaccagaggtacaaagaggagctgctaccatcccttctgaaactattcgaatcaagagaaaaagagggaatcttccttaactcattttatgaggtcagcatcatcctgataccaaagcctggcagaagcacaacaaaaaaacaatatccctgatgaacatcaatgcaaacatcctcaataaaatgctgacaaaccaaatccagcagcacatccaaaagcttacccaccacgatcaattcagcttcatccctgggatgcaagcctggttcaacatatgcaaatcaataaacataattcatcacataaacagaaccaatgacaaaaatctcatgactatctcaatagatgcagaaaaggccttcaacaaaactcaacagcctttcatgataaaaactctaaataaactaggtattgatggaacacatctgaaaataataagagctatttatgacaaacccacagccaatatcatgcagaatgggcaaaacctggaagcattccctttgaaaaccagcacaagacaacgatgccctctctcaccactcccactcaacatagtattggaagttctggccagggccatcaggcaagagaaagaaataaaggacattcgattaggaaaaagaggaagccaaattgtctctgtttgcagatgacatgattgtatatttagaaaaccccattgtctcagcccaaaatctccttaaatctgataagcaacttcagcaaagtctcaggatacaaaataatgtgcaaaaatcacaagtatttccatacaccaataacagatgaacagagagccaaattatgagtgaactcccactcaacaattgctacaaagagaataaaatacctaggaatccaacttacaagggatgtgaaggacattttcaaggagaactacaaaccactgctccatgaaataaaagcggacacaaacaaatggaagaacattccatgctcctggaaaggaagaatcaatatcatgaaaatgaccatgctgcccaagataacttacagattcaatgctatccccatcaagctaccactgactttcttcacagaattggaaaaaactactttgaagttcacatggaaccaaaaaacagcctgcataggcaagaaaatcctacacaaaaagagaaaagctgcaggtatcacactacctgacttcaatctatactacaggtctacagtaacaaaaacagcatggtactggtaccaaaacagatatatagagcaatggaaaaaaacagaggcctcagaaataccatcacacatctacaaccattggatcttcgacaaatgtgacaaaaacaaacaatggggaaaggatttcttatttaataaatgttgctgggaaaaatggcgagccatatgcagaaaactgaaactggatttcttccttacaccctatacataaattgactcaagatggattaaagacttaaatgtaagacccaaaaccataaaaacctaagagaaaacctgggcaataccattcaggacataggcatgggcaaagacttcatgactaaaacaccaaaaacaatggcaacaaaagccaaaatagacaaatgaaatctaattaaacttaaaagcttctacacagcaaacgaaactatcattagagtgaacaggcaacctacagaatgggagaaaatttttgcaatctacccatctgacaaaggactcacatccagaatctacaaagaatttaaacaaatttacaagaaaaaaacgagcaatcccatcaaaaagtgggcaaaggatatgaacagacacttctcaaaagaagacatttatgtaaccaacagacatgaaaaattgctcatcatcactggtcatcagagaaatgcaaatgaaaaccacaatgagataccatcttacgctagttagaatggggatcattaaaatgtcaggaaacaacagatgctggagaggacgtggaaaaacaaaaacgcttttacactgtgggttggagtgtaaattagttcaaacactgtggaagacagtgtggtaattcctcaagtatctacaaccagaaataccatttgacccagcaatcccattactgggtatatatccaaaggattatgaatcatgctactataaaaacacatgcacacgtatgtttattgtggcactgttcagaatagcaaagtcttggaaccaacccaaatgtccatcaatgatagactggattaagaaattgtgacacatataccccatggaatactacgcagccttaaaaaaggatgagttcatgtcatttgcagggacatggatgaagctggaaaccatcattctcagcaaactatcacaaggacagaaaaacaaacactgcatgttttcactcataggtaggagttaaacaatgagaacatgtggacacaggacagggaacatcaaacgctagtgcctgtttgggggtggggggctatgaaagggatagcattaggagaacacttaatgtaaatgttgagttgatgggtgcagcaaaccaacataacacatgtatacctgtataacaaacctgtacgttctgcacatgtatcctagaacttaaagtataataaaaactgaaggctacagactataatttctgaccaaaatggattaaaactagaaatcaataaccgaagaaaattcataaaattcacaaatacatgataattaaacaatttattcttcaacatgtttttgttcaagagttaaaaatttaatattttgaacgtgtctataatgcccaaagtgagctgcagatttaatacaatccctatgaaattcttaatattatttttgacagaaacagagaatgtgactccccaaagtatacggaatttcaggggaccacataaaaaaagttggaagcattacaattcctgatttcaagacatgttagaaatctacagtaatcaaaatcttatgttactagcataaagacagacaattagactaataaaaaaatctttgccactgctgcagacagtgcctgcatcatcctgcagactgacaatgatcattttgctgctgatgactttaaagtgtgagacagacctggccatgtgccagtttgtggagtgcgacattactgataacaccagtgtcagtcagcctctgctggagacagagatggaggccctcaaggaagagctgctcttcatgaagaatcatgaggaggaagttaaaggtctataatacctgatttccagctcttggttgaccatggaggtagatgtccccaagtctcaggaccttggcaagatcatgacaggcatctgggcccaatatgacgagatggctgagaacagctgagaggagctggacaagtactggtcccagcagactgaggagagcaccagagtagtcaccatgcagtccgctgagatcggagctgctgagaggatgctcagggggttgagatgtacagtccagtccttggatatcgaactggactcaatgagatatctgaaagtcagcttggagaacagcctaagggaggtagacgcagatggagcagctcaacaggatcctgctgcacctggagtcagagctatcccaaaaccgggaagagaggtaccacgcccaagagcacgaggacctgtggaacatcaaggtcgagctggaggctgagattgccacttactgccgcctgctagaagacggggaggatttcaatctcctggatgctctggacagcagtaaatacctgcaagctatccaaaagaacagcccccgcaggatagtggacgggaaagtggtgtctgagaccaacaatacagactttttgttgtgctaagccatcagaagcaaggtccctttggggagcaggaggccagtaaaaagttcagaggtaaaaaaaaattaacttcaaatcacagaagtgtttccttcaacacaaaagtaatatagattcattaatatatagaagtggaaattaagacaatttccacaactactcacccagagaggattaaaaaaataattgaccaccaactaattaaacaaatacacaagtcataaataaagtatgagtaatgtttatacaagcaaatgaacagagaattatgttggcaatagacgtgtggttgattcatatttgactgattcatattcaactgtacacagttgaatatagtcatacaaaattataatatataggcagaatctaaaaacacaattaaataatgtaaggcagcctatcctaacaaggaaatacaagaatatataatattagaaaataaaattaaataaacattagcctgtgaaataccgaataaacaaagcatgcaacggaagaagactctttccagataactagcatgttcaaccataactgggctcccataaagagcagattttgaattcttagcatatggttagagtaacaaaattgcacaacaaatacattataatctcccataaagagcatttagaagaaaattttaataaagatttcaatgatattagagacactttttattatgttcttaatatattactcctctttttatacaaatggaaaggctataatttatttattttttttaattttttgagatggagtctcgctttgtcacccaagctggagtgtagtggcgagacctcggctcactgcaacctccacctccctggttcacgccattctcctgcctcagcctcctgagtagctgggactacaggcgcccaccatcacgcccggctaatttttgtgtatttttagtatacacggggtttcaccgtgttagccaggaaggtcttgatcttctgacctcgtgatccacccgtctcggcctcccaaagtactgggattacaggcttgagtcaccgctcctcgccggcgatattttttgtagttttagtagagacaggatttcaccatgttggccaggctggtcttgaactcctgacctcatgatccacctatctcgaccttttaatgtgctgtgattacaagcatgaaacacagcactggcctataatttattatttttaaaacaaagaaaagccttacatttttacatatgggaacaacatgaatattgtaaaatatgctgtggaaaactacaatataataagcaattagaaataaattatactatcattcagataaatgttgaggaaagtaaatggaaacactaatgataagtttttctatgcagtgaacttagacacaaactaaaacttttcttaatgtgatgtgcatatcatccaattcactttttatataacacataaattcaagtatgttttctgaaacccctgaagctaaagttataggctaatttgacatacgtaaaaacaggacagggaaaacatacagatcacagtcccactaagctttatataagattaattaataaaataactcattaagaaataatgtaacagttaagaatttgttctattcctggcatgtttctaagtttttctatggattaaggtccttaaaaattctttgagatgagtagatacaataaactattccataggtgatatgtttggcatagagagttcacatttctaagttagtttctactaagggaaagaaaactttttgacctacattaccagagatgaaaaaaagaataaagtgaaatagaagattcaactttatcatatctgctgaggtgctttgggctctgataaattttttttctgatttttttgcaggaacacatttgaaataataggactgaaaattatgaggaggaaacatttgtccttggtgtttctgaaatatgtgaaccaaaccccaatgcctgcacttttgctctcacaaacttctgacatgaggcacagatttttacaaaacagcttaacatagaagtctcacaaaatgtgcagatttcctcagatcccaaaaacaatggaaaagcactcagaccacaagagcttcatgggaatagcagaaagaagaggtgaactttggctgtcactgtgaatgccctggaatgttagtggatgaacagagaagccttagaagatttaagagcataataagcatagggtaggaaatttccacctgtggcagcaaaagaagtaaatttagaattttccagaaccaatttctttgaagcagaacttccaacaccacatttttaaggttttctccttggcctttgcacctctcatctttgttatttgtttattcttccctattggggtgttgcctattattctctctctttttacattccaaagacatttcctttactgtaggacaggggcatccacgggagactacagccatgagttcttagtttctgtttctggttgagccagtaaggccctttcctcatcccccttttccacttatcactagacacagaacccaaaaaccattgctgcaggctgctaaaaacctaaaacaaaacagagccataacaaaaacaaaacaaggcgggttggaaaagcttgctgtacgaggcaaccaggtctggcttatattcaccacatcccttcttctttcccagaacagcaattgggctcaagagaaaacgtccaacttttagtatatccctcagtatagaatgagaacagtggaacatatgttcaaaggtttggctttgtgggctaccgctgatgactagattctgtctccccaaacagggaatgctaaaggaaatggcagagtaatgagaatgataacttatgactgctgagaagagaagttacatgcttaccacagcctcagagaaacaaacactacaatcaactgcggaagcaaaggaccacagtgtctggaaaacaatgggaaaaaatatctttaccttaaaaatccacacacaagcccagagaagacacattgaagacactgttaatgaagaaccaggatgtacagcctcactgattgttgtattatcttgtagtaagcaagtttgtacatactacattacacagttgttttataaatttctgaatctcatcaaaagattgcagggcatacagaaaaggacgaaaacatgtcccaattgaagaaataaaataaacctacaaatattgatctttaaaaatctttgttgacttttaaaggtcaaaatttgtaggtttattctttgttgttgttgtttttgcattatataattttgaaaatcaaaataattatcaaagctccttaatgatatgaacactcctccagtccgcagggctccggcaagggaggagcttagacaccatgcgggacacccgggtggacccccaacccacgcccgaggctcagagcaggagcaaggacctggctgcaccaggccgaagccgcctccacccccagcggtcgcggactccaggagctccagacctggggtcgtggtgagattcgttgattgactgcgcgatggtggctgagttgcaaccaaatgggtttcatcaccttaaatggttttgaaccaatgaagctatattcccttaaagagacggacagcccatcgtgtgaactatagagtttgtgaacaaatttatattgggttcatagtggcatcatgcacacagactcctgcgagttcccctaagttcttagaggactgctttaccttttgatctgagagttgcaaagttccgtaaagaatggccctgtggataagcgctaagtcaagagacagcgattggacagaatttgtgaaggaattcgccgccagatcacgaaagaccccctaagcccccgctcactggcagcgttcctggtcggccgtgactgcactgtggacatgcccatcctgaaggccaccgtggccttctatgatgcagtccacgcaggaaatccacgagaaagttctaaacagagccgtgggccccatgatgcaccacacaatcacctcaccagggaggttctggcaaatttcaagtccttgagagtgatcgtgggggtgggcagtggctatgacaacgtggacatcaaggctgccagcgagctcggaattgctgtgtgaaacatcccgtccgcagccgtggaagagacagccaattccaccaactgccacattctcaacatgtaccggaggaacacatggctgtaccaggcactgtgggaaggcaagcgggttcagagcatggagcagatctgcgaggtggcctcgggagtggcccgcattcgtgggaagacgctgggcctcatcggctagggtcgcacgcagcaggcttttgcagttccagccacagcctttggattcagcgtcatgttttattacccctacttgcaggatgggatcgagcagtccctgggcatgcagagggtctacaccctgcaggattggctgtatcagagcgactgcatctccttgcactgcagtctcaacgaacttaagcaccacctcatcaatgactttaccataaagcagatgaggcagggagcattccttgtgaacgcagcccgtggtggcctggtggacgagagagccttagcacaggccctcaaggaaggcaggatacgaagggcagtcgtcgacgtgaacgagtcgcagccctttagctttgctcagggtccgttgaaagatgcccccaatctcatctgcactcctctcactgcctgctacagccagcaggtgtcactggagatgagggagacagctgccaccgagctccgccgagccatcacaggtcgcatcccaggaagcttaagaaactgtgtgaacgaggaattctttgtcacatctgtgctttggtgggaaatagaccagcaagaaattcatccaggcatcttgggcgtgggtccaggaggacttcctgcatccatggaagggacattccctggaggcatcccggtgactcacaaactccccacagtggcacatccttcccaagcaccctctcccaaccagccctcaaacacggggacaatcgagagcaccccaacgagtaataacagagaatgccggaaggtaatcattcagatacacttttgaagaagagacagtgaaaaatagacaaactaagagaaaaagaatctgacgctctttttagctgattctggacatatgctcattggttttgcactgttaaaactgcaagacctagaaaactgcagatgtcgtctgcttacggaagctctgaaagactaggatgtgatttattaaccaccaacttccgttattatgtgtttagtttttcatctgtgcatcaaatcacaaagaatgaatacaattttttcctttatcagtcccttgggcacagcaggtctggaacaccctgctcagaatgttgcatcaagacttcaaacatcaaaataaaaaccatgaggaggaaatccccatcttgtgacttgagtcccttcagtctacagggactggttacagcattttgttaataggaagatcacattactagaaaatatggagtaaactgtttgcctatggtagacatcctcacacataagattgaagacagtaccggctcctgtacagagaagcgtctctcacatctgaactgcatactgagcgggcaagttggttgtaagttcagtaaaagcctctgataatgcaaaaaaaaaaaaaaaagtattaagtttcacacgctgtttgtaatcaagtatattttctcagtttcagatcctctgctattttatttagtgggaagtcttgcactaaaagggttcaagaaaaatagtgttgcattttcttatgtcacaggaaacacttttaatggtaacttgtcagattgtctatgaacaaacccactttttaagacattgataaagtcttcttttcttcacgttgtgttttatacaagaacacttcagctgtattggatgtgactgattttaacaaattatattagatttgcatcaattagttacatgttctatttatagtcttttgtgaatatagtctttttgtttaaaaagatggcctgttttgatcctttgattaggtacattcccgtttttgtaagaaaagagaaatttttaagactgtcccaaacagaaaaataatggctatcagaagtacgttttgttttagtgtagtgcgaattaccgttactgtagttgtttattgtaaagatggacatttagcattcagtgcagttttcaataaaatgtgattagaaaaaactgcttaatgaacaaaaacagaacatagacaacaaaagaatattagaagaagtgatacataaagaaaatgagatatcaataaaaagatttttaaaaaccaacaattgtgaatctgaagaacataatagctatattaaaaatttaatcaacagtcacaaaagcagactaataaaggagaaaaaattacacaattgatgacattgtagttataaatattgagtgatgaaaacaaattttttaagcagaatggaggaaaaagtatgggaagtactgcacatggtcaagtggaccattatatttatgaaaggagtcttacaaaaacaatataggagaaaagtaataaagaggttatttttaaaaagtagctgagaaatccccacatggcaagataattaaacaagaagaaatacttccaaacaaaaaccttcaactggagtaatatcacttcagaaataaaaaaactaaacctttccaaataaataaaagttgattgtgttactaaccactagaacagtcctaaaggaagtgtaaaagagtctatcacgtccaaaaatgaaatgatgctgcagagcatcataacagcacatgaaaatagaaagctctctattaaaggtaaatatataaacaggtaaagaaatctctactgtcataatcatggtgcacaaaactttcaaaatattgccatggagtttaaaacatgaggcagaaatctgcataaatttgtgatcatagaccataaggaaagataatatgcgatattaataaaacagtgggggtgtcaagaggtacaactttgcattcagttgaaatatagttgttctatactgtcataactttaagatgatttatgaagtctttatttctcaggatgattaccaaaaaaaacctgtagaatgtatgcaaaggcaaatgagaaagaaattcaatcacgtcactacaaaatcaacaaacagaaataaagcagtaagagaaaaaatgataaataacacatctacaagaaacacagaagacaattacaaataataaagtaacttcattaaatgcagtaattacttcaaatataaaaagttaaataccttaaagaaaattaataaataatttaatggattaagaacaaagaagatccagcaatttgctctctacaagagtcacttcagctctaaggactcaaataagttgaaagtaacagtataaagaaaatatattttattcaaagagtagctaaaattggagggccatggtcataattatactaaacaaaatatattttaaatcaaaaatatgaacaagagacagattggtattgtgtttttgtttttgtttttggagacagagtctcattctgtcaccaggctggagtgcagtggcacgatctcggctcactgcaaccacaacctccctggttcaatcgattctcctgcttcagcttcccgagtagctgggactacaggcacacgccgccacctcacccagctaatttttgtactttttagtagagatggggtttcaccttgttggccaggatggtctcgatctctggacctcatgattcacccgcctcggcctcccaaattgctgagactacaggcgtcagccactgcgcccggccgagagagattggtattatgtaatggtgagatggattaactttccaggaatctataacaataatttataaatcatatatatataatttgaaaaatctgcaaaaatataccactgagattttgacaaaaattacattaaatttttgtattactataaatagcactgacatctttctttctttttttttttttagagacagagtttctttctctctggctggagggcagtggcatgatctctcgataggctcacttcaacctcctcctcccaggttcaactgattctcgtctttcaaatatgtaaaacaaatattgacagaagtcaagcaagaaatacatagcaacacaacaatggtggacttcaagactccactttcagtaatgactagaatagtcagaagtaatatcagtaagaaagccaaacctgaacattatagacccaaccagcatttacagaactctccaatttaaaggagcaaaatctgcaatattctaaatcacacatggtacattctgttaggatacatgtcttattaaatttaagaaaactgaagccatacaatgtaaatgaaactagaattcaaaagcaagaaaatgtggcaaatatgtaaataagaggaaattaagcaaaatctttcatatagtcttgctcaagtgtcaggtgatttaatattgttaagatgtcagggccggcatgaggctcatgcctgtaatcctaggactttgggaggccaaagtgggtggatcacttgagatcagaagtttgagactagcctagtgaatatggcaaaaccctatctctactaaaaatacaaaagttagctagacgtgatggtgcacgactgcaatcccagctactctggtggctgagactggagaattgcttgaacctgggaagcggagcctgcagtgagcacatctcgcacccctgcccttcagcctgagtgactcactaaaactccatctccaaaaaaaaaaaaaaaaaaatgttgtcagtactactcatgatgatataaaaatgtaaggtaatttttgtcaaaatcccaatggtattttttttgcagaatttttgtgtataattctaaacgttgcttaggacaggtgactagccaaacaccctttaaaaagaacaaagaggtattacattttctgattcaaaatcatgatacaaagctacaaaaataaaaacaatgtggtattgccacaaaaacagatacatagatgacgaaacagaatagagatcccagaaataaacccttgcatatgtgataaaataatcttccgtaagctttccatgaccacacaatagaaaaataagaatccatttaacaaagagttttccaaattgaatatttacagagaaaaaaataaagttggatgcttcctttgtatcatatataaaaagaaaagtttttaaaatgaattcaatacttaaacataaaacctaataaaattcttagaagtaaacataagggaaaagtttatgacataagtcttaaaactctttccttaagtttgacatcaaattcataagcaacaaggaaaagaacaacgaccaagaaaagggactacattaagcttcaactattctacacatcaaataaaacatttagtgccatacaaacgtcacctaataagtgggtgaaagctaggcatggtgtctcatgcctttaattctacaactttaggaggccaaggcagaacaatcacttgagaccaaaagtttgagactagccatgaaaacatagcaagaccctgtcttgtatagggttatatatatgcatacatacatacatataactaaaaagagtaaaaatattttctaatcacatatttggtaggtgttaattttcaaaatatataaattcctaaaactcaacaacaaaaaaagttaataacttgatttagaatggcacatgtttgaaatgactttctccaaagaagacatagaaatgactaggcatttaaaaggatactcgacaactctcttctagaaaaatacaaagaaaagtcacaataatctatcacatcaaacctatttttaaaatagtatgaaagctcttcaaaaaatttaaaatgagattattatacaatccagcaaaccccattctggctatgtatttaaaatatacaacacatgatccggaagagatatttgcacacccaaatttattgcagcattactaacacaagccaaaaggcagaaacaacccagctgtcccttgaccaatgaagagattaacaacaagtggcacatacacaaagtcgaatattattcagtctttaaaaagtcacattatatgattattcttgagaatatcacgttaactgaaataagccaggaacaaagtgacagtctatgattccattcataatcaggtatcttaagtagacaaactcatagaaaaaaaaagttagaatggtgtttgtcaaggactgaagagatggtaaaatgggcaattgtcttaaaagacatttaatgttagttttgcaagacatagaagttctacagatcttttgcataactatgtgaatgtacttaacgctaatgaaatatacacttaaaaagaattaaaatggtaaattttacattatgtgtttttaccacaatcgcaatttttaaaaggaaaaatatggacttataaagctttccaaaaattaaattttgttcacaaaagattttctctcacacaaaggaagtatagatttataattaaacacattgtgaaattaagattatttcaatgactattcatccacacaagataagacaaccactgaaaatcagccaaaaaatatggaagataagccatgagcaaagttggggacatatttatagagacaaacacatatataatttaattttgaaaacgtatgaccgatttatattttaattaaacccaacattagtttcctgagtgaaatttggttttcagtttgggcaaatgaagacctttctgtggttaaaaggattctttcttctccgtttcttcatatggacctgtgctggggattggtcagctgttcaagtgcaatgcactcagttttggttctgtgccaggattaaacctacgatatttcacatttcatatataaaccccgatgaagtgtttctaggagatggctgcctcataacctatattttgccaaatgtttactatgaatttcaccaccatcctcttgaaggtggtattgtaactaaaactcttcaggacattctacttaaaactaaaatcacgtatatctcaagaaactcctttctgatttgaaatgcctctgtcatgtattgtctgcaatcagcctcctctttaaaagaaagtagaaaggacagatgaggaaactgatagtgttactgcatgggagacagaggtgaggatacacatggcggatgaaaacatggaagttatttctacagcacgatcttgtaagtgtctgactgctatgctcccttgtatatcaaatgatgtacctttattgcaagagaagatagtgcgctgtttaccttgacattgagaggcaattttgaatctctgtcgtgattgtttaggactgaggatttaatgtgctattttgtggaaatcttagaagcagtaatgggatttaatgatcttaactatcatccttctgaaaaatctaacgcgattttaaataaaatggccggctgcttccaccgttccctttttaaaccaggagctgccgttgcttttaacattacgaagttgaatctatgaatagtttgtactattaacatttttttaaaaatccacattgacttgaagtgtacaggcagagttggaaattataacatccaaagttataatacataagtaaaacccaaaataaaatcaactgctgccctggaacctattataaataatcgagacagtaatatggaattgtaaagaaaaataagaaacatatttactcataaaatcttgcaagcaaagtttttttctttttttgagacagagtctcactctgtcacccaagctgaagtgcagtggcgagacgacggctcatttcaacctccgcctcctgagttcaaaccattctcctgcctcagccttcactgagattacaagcacctgctaccagaccaggctaccttgcatataaacttgatatatcatttatgaaaatactttttagataactaaaatattctactgtgactgtgcattcatgaagttcgggtatcttgaatcattggcatgcagtgtgtgacagtaaaatttcacagaaaatacactgtaaccattaataaaaggccctaataagagaattttaatgcataagaattgaaaagacaccataaataatttccgttgtatttttaatacactgatgctattcttacacaaagtaaaaaggctgggtaagttgtggtggctcacacctgtaattccagcaatttgggaggccgaggtagcagattgcttaagcacaagagttcacaacatgcctgggcaggatagggagaccctgtctctgcaaataataataaacagccaagtgtgttaatacacatttgtggtcccatctgctcaggaggctgaggcaggagaattgcctgagcctgagtggtcaaggctagagtgagctgtgattatgcattgcattccagcccaggtgacacagtgagaccctgtttaaagaaaaaaacaaacaaaaactaaaaattaaccaggagtagtggcatgcacctgtactcccagctacttcagaagctgaagttagaaaatcatttgagcctgagagtttgagtctgcagtgagccataattgagctactgaactccagtctgtgtgacagagcaaggccttgtcatagatagatagatgatagatgatagatagatagatagatagatggaatacacctggagaaagagtaaattttaatgtagtgtgatgtaatttttaaaataaactttatgtgtgtatcacttagaaatttatagaacaggccgggggcggtggctcacgcctctaatcccagcactctgagaagacgaagtgggcagatcagggggccggatatcgagaccaagaccatcctggctaacacggtgaaaccctgtctctactaaaaatacaaaaaattagccgggtgtggtggcgggcaactctagtctcagctactcgggaggctgaggcaggagaatggcgtgaaaccgggaggcagagcttgcagtgagccgggatcgcgccgctgcactccagcctggacaacagagcgagagtctgtctcgaaaaaaaaagaaatttatacaacttagccagaagaataaaaaacaacctcttaacagttttttcaaataaaaaaagtgagtttgaagagaagggaataaaggggactttcagtttaatgtgttttttattttttgagtcagggtctcactttgttgcccacatggaagcgcagtggtgtgatttcagctcactgcaaacttggcctcccaggctcaaacaatcctcccacctcagcctccctagtagctgggaatacaggtgtacatcaccacaactggttaatttttgtatttttgtagagagagggttttaccatgttgctcacactggtcttgagcttctgggctcaaacaattcacctgccttgggctcccaaagtgctgggattgagccactaggccaaccaagttttttgtttggttttgtttttgagatggagtctcactctgttgcccaggctagagtgcaatggcacgatcttggctcactgcaccatttgcctcctgggttcaagtgattctcctgcctcagcctcgtgggtagctgggattataggcacccgccaccgagaccagctaatttttgtattttttagcagagatggggttccaccatgtcagctaggctggcctcaaattcctgacctcatgatccacccacctcggcctcacaaagtgctgagattacaggcatgagtcactgctcccggcgaccagccaagacttttactttataaagatatttatgatgttttcttttctttttacagtacgcattgcatttataattggagatacaaaaaaaggtgactgttactgtttgacagcaaggcagtagtattatcttcatcaatatttgcaacttaattcgcaggaacctgtaagagaaagcccagacaaaactttaaggcaaagaagttacacttgtaaaaaatgagaggactatttttttataataacaaatattccaggtgaggactggtcaggatctaccactgctccatctcacttgataagtctcatgcctgccagggtaagaaggagcagagagaaggacaaatgccagtgagtttcctctcccactaaggatctgtttgtcaagtttcctaccatcaagtggaagatgtactaaaaataaaatgtacccttgcagatgctagcagagaggcacaaaatagaaaaggaggtaagcccatatattgtggagaaagagatccaacttaagattcaaaatgcaccagaaagctgtgtaaagttaataaaattactcaaaatcttggaacatttgtttcctcacctgtaaaatggggatcatgtgcctacttcataagttgttttgacagttaaattcacagagatatttaatagagcctgctatggcaagtgttcacattaacaaagtagtatcaaacttcaaaatatgggaaaggtattttgaataatgtctatgaggccaaggacaacatgcccagcttcacaatcaatcccagccacattacactgaggagatctacaggcaactatatttcttcaacaaattccattagagaggaagagtgtgtagtctgaaaacatgacacaaatgtgaccagtgtacagtgacttaggtagtcgggggtggaatccctacatattctctgaattgcagctacacagtgagttcccaggaaacaaatggaatagaaaaggtgacacaaaatatactaccataaatggggtgagcatagcaggttcacaaccacaaatgtaagcaggagactcaaatcaccaggagcacctagatctgtgaacagcagcttgtggtggcatcaggttcaactttctgagaccaccggtgtgggcagtgtctttgcaggcacatactcggcagcagtgtatctgaagacagatctcaaggctcttctcttcactaattattaagatgatagatgatggataccctcacgttacaacatccccactaacgctgtggacaagtgaattcagaaacccacacctaaatacacagtgaagagtaggatgagaatactgcaggataggttaggaatgcaggcattcgaccccatagagtctatttaaaataagagaagggccctagtattgtgctgtggtcctcctatatatagttctttatttttccaatttcataaaggccatacagtttttcttcctttcttcacaaatgtgctgatgaacccatgagtaattcatcctgaaggggttaattcctcataaagtacagtaacgtgattcaattgctatgatgaggtttttcaggatttttttatagtgtcccatactcaccgatcacaagtgaaaattataagaacatgtaatttgaacaaagtattcttttcacatagagaaatacacaggtttatacagattagatgcatcatcaaagttggtaacatctgggaacaaaaggaactatcctgaggacataaggaacttagggacgtcgattattaagaggctacctgcaagtggaacttctgggttttcattgtctagacagaaaaatttaactcataagccccagtatattaaggtacatccccaacggctgtgggggatcaactttccatccaaagcagagatgtaaaacatgaatgacttcaaatgcggctcaagtgctctgcaccttgaaagtcatccccacaaagctggagcaccacctgttcctgagggatgaggtcaccaactgcttttttgagacactcgtcagtcaggactcagttgagatgaggctggtgatttcaactgtaaaatatctaaaccatcgtctttaggtagattcttatgcctgggaattgtggttttctcctctgctgttagcagatcctgagtaacccaagaaatacccgctctcacccgtcaagttctatatcacaagaaaggcgctgcagacggtgacattttcacgaaggagccacagcccgcatcaccccctgaaagctctgaagttgcgcacgggtgggtcacgcagcaggtggatgtctcagttcccatagagtttagcagagcaggcggctccctgggctggaagaggtgcgatgctctggaaaccccccgcgggtgtgtatgtgagaggacaccgagatgttcagcgggctgttcagtgaggaccagacccctccgatttgagcaagggaggtgcacttcgcagggtcacaccgtcctcatcgcccagcctagacctgcccctcaagtccttctgcggactcccttggcgagggggtggcacagaatcagcatgtggcatcgcttaggaaaggacgagtccacaccgccctgtccctccctccagggctgcgcaccacggggtaggacagacagcgcatgctggttttgtagttagcaggtcggcgaccaatgggctggaaaccgttaagacaccataactcccagcactcctagctagggacgcgcctccctatccttcgcttccatactacacaccgcccccaaacccagcgcatgctgagattgtagtccgttagcctcgcgaccaatgggctggaaatactgaaaggactatgactcccaggatgctttgcgaggtacccgccgtcccgatccttcctctagggctgcgcaccgcccccaagcccaacgcatactgggattgtagtcaggtagtcctgggaccaactgactggaaactgttaagagaccataactgccagcacgcctggctaaggacgcacctccctatccttcccttcagtgctacacaccgcctcgaagcccggtggctgctgggattgtagtctgcaggccgggggccatcgctggaaaccgttaagagaccataactcccagcatccctggccagggacgcgcctctctatccttccctccagcgttacacaccgccccaatcccggtgcatgctggcattgtagttcggtagccttgcgatcaacgtgctggaaactgtttaaggactatgactcccaggacgccttgcgagggacccaccctgttgacccttcctccagggctgggaacctcccttaagcccagcgcatgctgggatcatagtccgactgccgcgacagaaaggctgggagtggatctgagactacagttccaacactacggggaaaatttcatcttctctgagactacagttccaacactgaggggataatttcatcttctcctccgcccctccatgtttccagtgcaattccgccctgctgaggggagcctatctgttcccaaacttctgcgtgcgaggagacagcgtggccagggcaggtggtctcacttgtaattgtggcacagtctccccacgtgccagttgtacgactatttgtgcctgaagtttgatttctctctgacaagacagagcccgggagcctccaacagcctgcccagcgttgctgtaacgcttgctttcggggagctgggcgcgcccagacctttgcagggcccctccctcagccccgacccttctcctcgcccctcccctgccacgcccctttcgacatgctggaaagtcatctacctttaataacagtcatctttgcaaaaaaaaaaaaaaaaaaaactctgagaataacctatctcccattctatttagtatttatttccatagtatccataaatagtagcaattagatatcacagcaagtcaagcaaaagccctgccttgcctgtttcataaaccacgatatggccttgctgtggttttatttgtattttgttttgtatttattgaccttttggatataaatatttaggtatttggacagtttttggaagtattccgctattagttgttgatttacttctgttccctatttaattattttttgtctctcccttctccttagactcagtcattccacaggtctcgagagttctgttcatttcctttaaactttttgtactttttttttccagactggataatttctattgctgtgtcttctgttttaaatctatggctaaactcaaaagatttttttcatttccttatctataatttttttatatatatgttcatttctctgctgaagttccacatctgtttgtttatgaatagaatattttcttttttccccatgaacatattcataaaaactgccttcaaattcttgtctgctgattgcaacatcctgggatagcttctactgcctgcttttgatattgtgtatggatgacattttcacgtttctttacaagtcttatgaattttaaaattgtgcactagaaactataaatgataattatagaatagaaactctggattttgctgttttaccttgaagacttttgttttataaacagggttcattgggctagtgtcaaaccaatgcttatgtccgctacagtgggtatagctgaaatcttcattcagttgttaaacacacatatcatatatgtattatgcataggcgtttttctataataatatattttattcaagtttcatcattgttatttgtgagagttcaacaagctagtccacacttagtggaagtcagaacctcagttttatttgattgtagcattttatataaacaaaattatatagtatgtatacttgtacatctgttttctttatttccttttctgttttctttctttctttccttttctgtcttctttctttctctctttctttccttctttctttctctcttcttttttctttctttcttttccccaggttggtgtgcagtggcatgatctcactgcaacctctgcctaccaggcttaagatatccttccacttcagccttttgagtcactgggaccgcagccttgcaccaccatgcccggctaattgttttgtatttttggtagagacagggtttcactatgttgcccaaactggcatgtctgctttcttttatgcaacattacatttgtgatattcacccaccagttgcaaatagctatagtctgttcattttagaaagtagtttttaccttttagtaaaatataaaaatacatgaaattaaccattttattattttttttgtgtgcagtttaaagaaattaaatacattcacattgttttgcaaccattgtccaagttcataaggaactgtttttcaatcttttaaaagtgaaactctgtacccagtaaacaacactccccttccattgccctttgtgtagtccctggaaactactcttctacttcgtgtttctatgaacttaactgctgtaaatatctcatatgagtggaaagagacaatatagcaaaaaaatcatgaggaagaataatatatactatataacatatgtttatccattttaagaaaaatgctagcagagatcaggtcatggtgtttatagagaaaggtaggtaacagtgaaaaagggattggttgcattaaatttacgacgtgatgcctcaagtgccagagtagtgagctttctgccccactcgcagggctggtcaatggtgtggctggaaccctacttgagctgcctgactgccagagcccatgcttagtacaaacttcaatgagccatgaaagcaattccaacaacaggcacttaatggctctgagattttatcacagcctgttcttcatggctagcaacttcagagaagagtgacagctgtgaggttccagaagccacacctcaggtcccccagttcctccccagcagctggagtccaggtgcaacaggacctgatgccggccagggaaccatggccacacgctgtgtgaggctggcggcaagacagtctcccctcctaccctctgctcatctgctaggtctttgccttttattctgattgtgctgctccaggcttggaacaaagcccgaaattcctcttgagtctgaagatgatgatggtttccagctgtgtggaactgctgcatctcctggaggactttaatcttctggaaacagagggaaagacaggatgctgacagggcctgggtgaaagactctgtaggggccttataaaagaagggaggagggctggtctctgaggtgtttcttttaaggggctctcacctcccctccaatatcatgcagccctaactggttctcagagttgaatgtaaacggcccttcctctaggaagttgtcatcaacttcactcccctgattgcaccctgcattaggataggtctcctccttctctgtgtattactccctttcaataaatcttagatgcggaagaagggaccagggaatgtcctgcccagggtgatttctcatttccacctccaccctccctcaaagtgaggacttcagctactgctcacctttctgtttttctgggttttgatcacatttctctggaagacagaaagccaaagaccatcagaaaggtccgctggtccataactagcctccatttccagcgatttccaagcttcaccactaccagagccaccagggtcagggaatgtgcacaaaagaggtcttgcagctctgcagcttcactactcagggagtgggactgatggctgctgtggagcctccatcactcatgagtaaaataccctgtttacgggatggggagggctgcgaggccctcgcaaaaaattttggcaaggactgagatctaggagctcagttcaagactctcttctcccaggcctcaggatcctggtccctgacctgtcttctccaggctcactcacatccacacactccttcatggcaatgtccagcatcaccacatcagtgaggaatgtccccagagagggcatgacttgggaggtgcccacccaagtcctgtccgctgaactcttataaacccctgcctcctggcgccctctacctaggttacccacttggagtagctgagaaccctcagctgccttttcccaattctctatgtcttcccattagctggcctctattgccaccaacctcaccataattacctccttggtgggattttaacaagccacaaggtcatgtggtccctggctccacctgttttaaaagccacacggagcccagctctcccaggccttgctctggtctgtctaatgaaggtgttttaggcactgcagccccaggagaaaagggctggagtagaaaggccctctgcttttttgatttggaggtttccagctgggagaagtaagctctgttctctgaaaccctggagcccttccccatcacagacacattcaccttctgctgtcacagcctcatctaagctctctgaggctccgctacagggtagacaacttgtacggtgttcacctgctaggatgagggacaaggtcagtgaaaatatgcttctttcagttacgcctcagccacactaaccttggacacggataagtggcctgagtcagcttgtccaatgctctgaccatctccagtaagctctgactctagactcactcccaggtccaacactccctggatgtgtcattttgggcatgcagtcgggtttccctgagctgtttcctcaactggaaagtgtggtgggaaccaaccacctcacaaggcctcttaccacctcggtttcatgtggttgtcatgattgctgtcaccatcttccctctcaggatgagccagacacaagcaccctcagattctctgtctccctgagccccatcaccaccttgtgaggcctgcccaacaggctcatcattcctacattttccacataagaaaacagaggcccaaagcggcaatgacatgccaaggaccccacaagagaggccagctcctccctcaacctagagggactgtcccggctgccttcacctaacaccctagcatcatcactgaccagcattccatcttctaaactctatgagtgacaatattcccagccaggccctgtggcagtggacatggttctgagaattgggaatctaatgtggaggaaaagttaaatatttaatatgaactcaattgaacatgggcacaaacaatggtcacgaagtcctggaacaggttgcatgaaccccttgaggtgttcatccagcgctgtttcagagaaatctttcaatccattcctatacattagttattgaaaaaacaacagacaattgcaaaaacaagttgatcttttgtgttccttgagcccagttgtgaagggcacctgtgactgcgcctcatgccaaacaacacattacaaaaagagctagggtcccagactgtgctgaagtttcatgagacctctcctcatctgtgcatggacacgtggctgactctggagcccaggctgttgcttcccagtctggtaatgaatcctccatagtctggtgcgtgtaaatatacatatacatatatgtatatttatatacatgtatatgtatataaatatacatatatatattttctttctgtccttcccattgcaatttgcttattatattatttgcttatcaagtctgtattgccatacacttgggataaaggctatttatccttaaaactattgtgggtgccttttcttttcccctcgttcatttcccgcaccggagcccaggtgatggaatctcgaagtgacctcacttccttagttacaaactcaaagaaagtttagaactctggtaacctggagccctaattctagagacagctttgtatttactaaggagactctgaagacagcaagatgttctcctgctatgtcttgaatttctgaggctctcatctcaggaaggcttgaacagagagacttttttttatgatggagacagtgctcattctgcactgctggctcttctggccatttggaaagggttacccatagataacacaaggccacccatggcaggcctatccaggccaggcctcacctttgatatcatctcggcaggcacacacccctcctcatctccacgtctcgtgggaaagaaagagataatgggtcctttcttggcaggagcaggtttccaggtattgggaggctaaaagcctgtcaaatttataccgcaggttacagttggcaggaggggaaggtgagtgctgggggtcacctttgtttgttcagacatttattctaaggcttcaagctgtcctcttgttttctccctggctggaggtctgcgcaaatgctcctatgtgcctgatctggggagtagactttctaactggaatttcccctgtggggaaagccaggatgccattgatgcctcttggccaggcttccaggcactctctttgcagaactctattgaggagatccctgaggagctgtttgatgagtccaactactccatctcattgaacaaaaggcaggtgcatcatgccaacaaccatggcccgtgctagtctggagtcaaggtgggcacagagaggtctccaaatggaaaagaccagggaagcccaggaccctgacccaaatgtgaggattccccagaaaccgttttagggctttctccattaaggacccacagttccttcccagaggaatttggcctccattagtccataatggcaacttaggtgcacagtccctggtcatatgcttgcaggaatgtcaaaagaaacacttttgtgttgttattactttacattaagttgtgagtatctttgcattttgctattatttttattgttatatctacctaccccacatacttcctggagcaggcagcttcgctgccttgccagaccttctctaagtcttagaagttcacactgttactagagagaggtttcacccaaaaagtgggagttatgcaaaagggtcttatatgactctttacatatgtgtcccagagcccacctctatagccccatcaggacaggagctgtgtcctcatatgtctttataagattccataagtggggcctttccctcagtaatttaggcttttaatactggtggagcctgacataataaattctatttccacttcagccatgctacagggaatatctttttttttttttttttttttttgagacggagtctcgctctgtcgcccaggtgggagtgcagtggtgcagtctcggctcactgcactctgcctcctgggttcacgccatcttcctgcttcagcctcctgagtagctgggactacaggcgcctgtcaccacgcccggctaattttttttctctgtgtgtgtgtggttttttttttagtagagacagagtttcaccgtgttagctaggatggtctcgatcnnnnnnnnnnnnnnnnnnnnnnnnnnnnnnnnnnnnnnnnnnnnnnnnnnnnnnnnnnnnnnnnnnnnnnnnnnnnnnnnnnnnnnnnnnnnnnnnnnnnnnnnnnnnnnnnnnnnnnnnnnnnnnnnnnnnnnnnnnnnnnnnnnnnnnnnnnnnnnnnnnnnnnnnnnnnnnnnnnnnnnnnnnnnnnnnnnnnnnnnnnnnnnnnnnnnnnnnnnnnnnnnnnnnnnnnnnnnnnnnnnnnnnnnnnnnnnnnnnnnnnnnnnnnnnnnnnnnnnnnnnnnnnnnnnnnnnnnnnnnnnnnnnnnnnnnnnnnnnnnnnnnnnnnnnnnnnnnnnnnnnnnnnnnnnnnnnnnnnnnnnnnnnnnnnnnnnnnnnnnnnnnnnnnnnnnnnnnnnnnnnnnnnnnnnnnnnnnnnnnnnnnnnnnnnnnnnnnnnnnnnnnnnnnnnnnnnnnnnnnnnnnnnnnnnnnnnnnnnnnnnnnnnnnnnnnnnnnnnnnnnnnnnnnnnnnnnnnnnnnnnnnnnnnnnnnnnnnnnnnnnnnnnnnnnnnnnnnnnnnnnnnnnnnnnnnnnnnnnnnnnnnnnnnnnnnnnnnnnnnnnnnnnnnnnnnnnnnnnnnnnnnnnnnnnnnnnnnnnnnnnnnnnnnnnnnnnnnnnnnnnnnnnnnnnnnnnnnnnnnnnnnnnnnnnnnnnnnnnnnnnnnnnnnnnnnnnnnnnnnnnnnnnnnnnnnnnnnnnnnnnnnnnnnnnnnnnnnnnnnnnnnnnnnnnnnnnnnnnnnnnnnnnnnnnnnnnnnnnnnnnnnnnnnnnnnnnnnnnnnnnnnnnnnnnnnnnnnnnnnnnnnnnnnnnnnnnnnnnnnnnnnnnnnnnnnnnnnnnnnnnnnnnnnnnnnnnnnnnnnnnnnnnnnnnnnnnnnnnnnnnnnnnnnnnnnnnnnnnnnnnnnnnnnnnnnnnnnnnnnnnnnnnnnnnnnnnnnnnnnnnnnnnnnnnnnnnnnnnnnnnnnnnnnnnnnnnnnnnnnnnnnnnnnnnnnnnnnnnnnnnnnnnnnnnnnnnnnnnnnnnnnnnnnnnnnnnnnnnnnnnnnnnnnnnnnnnnnnnnnnnnnnnnnnnnnnnnnnnnnnnnnnnnnnnnnnnnnnnnnnnnnnnnnnnnnnnnnnnnnnnnnnnnnnnnnnnnnnnnnnnnnnnnnnnnnnnnnnnnnnnnnnnnnnnnnnnnnnnnnnnnnnnnnnnnnnnnnnnnnnnnnnnnnnnnnnnnnnnnnnnnnnnnnnnnnnnnnnnnnnnnnnnnnnnnnnnnnnnnnnnnnnnnnnnnnnnnnnnnnnnnnnnnnnnnnnnnnnnnnnnnnnnnnnnnnnnnnnnnnnnnnnnnnnnnnnnnnnnnnnnnnnnnnnnnnnnnnnnnnnnnnnnnnnnnnnnnnnnnnnnnnnnnnnnnnnnnnnnnnnnnnnnnnnnnnnnnnnnnnnnnnnnnnnnnnnnnnnnnnnnnnnnnnnnnnnnnnnnnnnnnnnnnnnnnnnnnnnnnnnnnnnnnnnnnnnnnnnnnnnnnnnnnnnnnnnnnnnnnnnnnnnnnnnnnnnnnnnnnnnnnnnnnnnnnnnnnnnnnnnnnnnnnnnnnnnnnnnnnnnnnnnnnnnnnnnnnnnnnnnnnnnnnnnnnnnnnnnnnnnnnnnnnnnnnnnnnnnnnnnnnnnnnnnnnnnnnnnnnnnnnnnnnnnnnnnnnnnnnnnnnnnnnnnnnnnnnnnnnnnnnnnnnnnnnnnnnnnnnnnnnnnnnnnnnnnnnnnnnnnnnnnnnnnnnnnnnnnnnnnnnnnnnnnnnnnnnnnnnnnnnnnnnnnnnnnnnnnnnnnnnnnnnnnnnnnnnnnnnnnnnnnnnnnnnnnnnnnnnnnnnnnnnnnnnnnnnnnnnnnnnnnnnnnnnnnnnnnnnnnnnnnnnnnnnnnnnnnnnnnnnnnnnnnnnnnnnnnnnnnnnnnnnnnnnnnnnnnnnnnnnnnnnnnnnnnnnnnnnnnnnnnnnnnnnnnnnnnnnnnnnnnnnnnnnnnnnnnnnnnnnnnnnnnnnnnnnnnnnnnnnnnnnnnnnnnnnnnnnnnnnnnnnnnnnnnnnnnnnnnnnnnnnnnnnnnnnnnnnnnnnnnnnnnnnnnnnnnnnnnnnnnnnnnnnnnnnnnnnnnnnnnnnnnnnnnnnnnnnnnnnnnnnnnnnnnnnnnnnnnnnnnnnnnnnnnnnnnnnnnnnnnnnnnnnnnnnnnnnnnnnnnnnnnnnnnnnnnnnnnnnnnnnnnnnnnnnnnnnnnnnnnnnnnnnnnnnnnnnnnnnnnnnnnnnnnnnnnnnnnnnnnnnnnnnnnnnnnnnnnnnnnnnnnnnnnnnnnnnnnnnnnnnnnnnnnnnnnnnnnnnnnnnnnnnnnnnnnnnnnnnnnnnnnnnnnnnnnnnnnnnnnnnnnnnnnnnnnnnnnnnnnnnnnnnnnnnnnnnnnnnnnnnnnnnnnnnnnnnnnnnnnnnnnnnnnnnnnnnnnnnnnnnnnnnnnnnnnnnnnnnnnnnnnnnnnnnnnnnnnnnnnnnnnnnnnnnnnnnnnnnnnnnnnnnnnnnnnnnnnnnnnnnnnnnnnnnnnnnnnnnnnnnnnnnnnnnnnnnnnnnnnnnnnnnnnnnnnnnnnnnnnnnnnnnnnnnnnnnnnnnnnnnnnnnnnnnnnnnnnnnnnnnnnnnnnnnnnnnnnnnnnnnnnnnnnnnnnnnnnnnnnnnnnnnnnnnnnnnnnnnnnnnnnnnnnnnnnnnnnnnnnnnnnnnnnnnnnnnnnnnnnnnnnnnnnnnnnnnnnnnnnnnnnnnnnnnnnnnnnnnnnnnnnnnnnnnnnnnnnnnnnnnnnnnnnnnnnnnnnnnnnnnnnnnnnnnnnnnnnnnnnnnnnnnnnnnnnnnnnnnnnnnnnnnnnnnnnnnnnnnnnnnnnnnnnnnnnnnnnnnnnnnnnnnnnnnnnnnnnnnnnnnnnnnnnnnnnnnnnnnnnnnnnnnnnnnnnnnnnnnnnnnnnnnnnnnnnnnnnnnnnnnnnnnnnnnnnnnnnnnnnnnnnnnnnnnnnnnnnnnnnnnnnnnnnnnnnnnnnnnnnnnnnnnnnnnnnnnnnnnnnnnnnnnnnnnnnnnnnnnnnnnnnnnnnnnnnnnnnnnnnnnnnnnnnnnnnnnnnnnnnnnnnnnnnnnnnnnnnnnnnnnnnnnnnnnnnnnnnnnnnnnnnnnnnnnnnnnnnnnnnnnnnnnnnnnnnnnnnnnnnnnnnnnnnnnnnnnnnnnnnnnnnnnnnnnnnnnnnnnnnnnnnnnnnnnnnnnnnnnnnnnnnnnnnnnnnnnnnnnnnnnnnnnnnnnnnnnnnnnnnnnnnnnnnnnnnnnnnnnnnnnnnnnnnnnnnnnnnnnnnnnnnnnnnnnnnnnnnnnnnnnnnnnnnnnnnnnnnnnnnnnnnnnnnnnnnnnnnnnnnnnnnnnnnnnnnnnnnnnnnnnnnnnnnnnnnnnnnnnnnnnnnnnnnnnnnnnnnnnnnnnnnnnnnnnnnnnnnnnnnnnnnnnnnnnnnnnnnnnnnnnnnnnnnnnnnnnnnnnnnnnnnnnnnnnnnnnnnnnnnnnnnnnnnnnnnnnnnnnnnnnnnnnnnnnnnnnnnnnnnnnnnnnnnnnnnnnnnnnnnnnnnnnnnnnnnnnnnnnnnnnnnnnnnnnnnnnnnnnnnnnnnnnnnnnnnnnnnnnnnnnnnnnnnnnnnnnnnnnnnnnnnnnnnnnnnnnnnnnnnnnnnnnnnnnnnnnnnnnnnnnnnnnnnnnnnnnnnnnnnnnnnnnnnnnnnnnnnnnnnnnnnnnnnnnnnnnnnnnnnnnnnnnnnnnnnnnnnnnnnnnnnnnnnnnnnnnnnnnnnnnnnnnnnnnnnnnnnnnnnnnnnnnnnnnnnnnnnnnnnnnnnnnnnnnnnnnnnnnnnnnnnnnnnnnnnnnnnnnnnnnnnnnnnnnnnnnnnnnnnnnnnnnnnnnnnnnnnnnnnnnnnnnnnnnnnnnnnnnnnnnnnnnnnnnnnnnnnnnnnnnnnnnnnnnnnnnnnnnnnnnnnnnnnnnnnnnnnnnnnnnnnnnnnnnnnnnnnnnnnnnnnnnnnnnnnnnnnnnnnnnnnnnnnnnnnnnnnnnnnnnnnnnnnnnnnnnnnnnnnnnnnnnnnnnnnnnnnnnnnnnnnnnnnnnnnnnnnnnnnnnnnnnnnnnnnnnnnnnnnnnnnnnnnnnnnnnnnnnnnnnnnnnnnnnnnnnnnnnnnnnnnnnnnnnnnnnnnnnnnnnnnnnnnnnnnnnnnnnnnnnnnnnnnnnnnnnnnnnnnnnnnnnnnnnnnnnnnnnnnnnnnnnnnnnnnnnnnnnnnnnnnnnnnnnnnnnnnnnnnnnnnnnnnnnnnnnnnnnnnnnnnnnnnnnnnnnnnnnnnnnnnnnnnnnnnnnnnnnnnnnnnnnnnnnnnnnnnnnnnnnnnnnnnnnnnnnnnnnnnnnnnnnnnnnnnnnnnnnnnnnnnnnnnnnnnnnnnnnnnnnnnnnnnnnnnnnnnnnnnnnnnnnnnnnnnnnnnnnnnnnnnnnnnnnnnnnnnnnnnnnnnnnnnnnnnnnnnnnnnnnnnnnnnnnnnnnnnnnnnnnnnnnnnnnnnnnnnnnnnnnnnnnnnnnnnnnnnnnnnnnnnnnnnnnnnnnnnnnnnnnnnnnnnnnnnnnnnnnnnnnnnnnnnnnnnnnnnnnnnnnnnnnnnnnnnnnnnnnnnnnnnnnnnnnnnnnnnnnnnnnnnnnnnnnnnnnnnnnnnnnnnnnnnnnnnnnnnnnnnnnnnnnnnnnnnnnnnnnnnnnnnnnnnnnnnnnnnnnnnnnnnnnnnnnnnnnnnnnnnnnnnnnnnnnnnnnnnnnnnnnnnnnnnnnnnnnnnnnnnnnnnnnnnnnnnnnnnnnnnnnnnnnnnnnnnnnnnnnnnnnnnnnnnnnnnnnnnnnnnnnnnnnnnnnnnnnnnnnnnnnnnnnnnnnnnnnnnnnnnnnnnnnnnnnnnnnnnnnnnnnnnnnnnnnnnnnnnnnnnnnnnnnnnnnnnnnnnnnnnnnnnnnnnnnnnnnnnnnnnnnnnnnnnnnnnnnnnnnnnnnnnnnnnnnnnnnnnnnnnnnnnnnnnnnnnnnnnnnnnnnnnnnnnnnnnnnnnnnnnnnnnnnnnnnnnnnnnnnnnnnnnnnnnnnnnnnnnnnnnnnnnnnnnnnnnnnnnnnnnnnnnnnnnnnnnnnnnnnnnnnnnnnnnnnnnnnnnnnnnnnnnnnnnnnnnnnnnnnnnnnnnnnnnnnnnnnnnnnnnnnnnnnnnnnnnnnnnnnnnnnnnnnnnnnnnnnnnnnnnnnnnnnnnnnnnnnnnnnnnnnnnnnnnnnnnnnnnnnnnnnnnnnnnnnnnnnnnnnnnnnnnnnnnnnnnnnnnnnnnnnnnnnnnnnnnnnnnnnnnnnnnnnnnnnnnnnnnnnnnnnnnnnnnnnnnnnnnnnnnnnnnnnnnnnnnnnnnnnnnnnnnnnnnnnnnnnnnnnnnnnnnnnnnnnnnnnnnnnnnnnnnnnnnnnnnnnnnnnnnnnnnnnnnnnnnnnnnnnnnnnnnnnnnnnnnnnnnnnnnnnnnnnnnnnnnnnnnnnnnnnnnnnnnnnnnnnnnnnnnnnnnnnnnnnnnnnnnnnnnnnnnnnnnnnnnnnnnnnnnnnnnnnnnnnnnnnnnnnnnnnnnnnnnnnnnnnnnnnnnnnnnnnnnnnnnnnnnnnnnnnnnnnnnnnnnnnnnnnnnnnnnnnnnnnnnnnnnnnnnnnnnnnnnnnnnnnnnnnnnnnnnnnnnnnnnnnnnnnnnnnnnnnnnnnnnnnnnnnnnnnnnnnnnnnnnnnnnnnnnnnnnnnnnnnnnnnnnnnnnnnnnnnnnnnnnnnnnnnnnnnnnnnnnnnnnnnnnnnnnnnnnnnnnnnnnnnnnnnnnnnnnnnnnnnnnnnnnnnnnnnnnnnnnnnnnnnnnnnnnnnnnnnnnnnnnnnnnnnnnnnnnnnnnnnnnnnnnnnnnnnnnnnnnnnnnnnnnnnnnnnnnnnnnnnnnnnnnnnnnnnnnnnnnnnnnnnnnnnnnnnnnnnnnnnnnnnnnnnnnnnnnnnnnnnnnnnnnnnnnnnnnnnnnnnnnnnnnnnnnnnnnnnnnnnnnnnnnnnnnnnnnnnnnnnnnnnnnnnnnnnnnnnnnnnnnnnnnnnnnnnnnnnnnnnnnnnnnnnnnnnnnnnnnnnnnnnnnnnnnnnnnnnnnnnnnnnnnnnnnnnnnnnnnnnnnnnnnnnnnnnnnnnnnnnnnnnnnnnnnnnnnnnnnnnnnnnnnnnnnnnnnnnnnnnnnnnnnnnnnnnnnnnnnnnnnnnnnnnnnnnnnnnnnnnnnnnnnnnnnnnnnnnnnnnnnnnnnnnnnnnnnnnnnnnnnnnnnnnnnnnnnnnnnnnnnnnnnnnnnnnnnnnnnnnnnnnnnnnnnnnnnnnnnnnnnnnnnnnnnnnnnnnnnnnnnnnnnnnnnnnnnnnnnnnnnnnnnnnnnnnnnnnnnnnnnnnnnnnnnnnnnnnnnnnnnnnnnnnnnnnnnnnnnnnnnnnnnnnnnnnnnnnnnnnnnnnnnnnnnnnnnnnnnnnnnnnnnnnnnnnnnnnnnnnnnnnnnnnnnnnnnnnnnnnnnnnnnnnnnnnnnnnnnnnnnnnnnnnnnnnnnnnnnnnnnnnnnnnnnnnnnnnnnnnnnnnnnnnnnnnnnnnnnnnnnnnnnnnnnnnnnnnnnnnnnnnnnnnnnnnnnnnnnnnnnnnnnnnnnnnnnnnnnnnnnnnnnnnnnnnnnnnnnnnnnnnnnnnnnnnnnnnnnnnnnnnnnnnnnnnnnnnnnnnnnnnnnnnnnnnnnnnnnnnnnnnnnnnnnnnnnnnnnnnnnnnnnnnnnnnnnnnnnnnnnnnnnnnnnnnnnnnnnnnnnnnnnnnnnnnnnnnnnnnnnnnnnnnnnnnnnnnnnnnnnnnnnnnnnnnnnnnnnnnnnnnnnnnnnnnnnnnnnnnnnnnnnnnnnnnnnnnnnnnnnnnnnnnnnnnnnnnnnnnnnnnnnnnnnnnnnnnnnnnnnnnnnnnnnnnnnnnnnnnnnnnnnnnnnnnnnnnnnnnnnnnnnnnnnnnnnnnnnnnnnnnnnnnnnnnnnnnnnnnnnnnnnnnnnnnnnnnnnnnnnnnnnnnnnnnnnnnnnnnnnnnnnnnnnnnnnnnnnnnnnnnnnnnnnnnnnnnnnnnnnnnnnnnnnnnnnnnnnnnnnnnnnnnnnnnnnnnnnnnnnnnnnnnnnnnnnnnnnnnnnnnnnnnnnnnnnnnnnnnnnnnnnnnnnnnnnnnnnnnnnnnnnnnnnnnnnnnnnnnnnnnnnnnnnnnnnnnnnnnnnnnnnnnnnnnnnnnnnnnnnnnnnnnnnnnnnnnnnnnnnnnnnnnnnnnnnnnnnnnnnnnnnnnnnnnnnnnnnnnnnnnnnnnnnnnnnnnnnnnnnnnnnnnnnnnnnnnnnnnnnnnnnnnnnnnnnnnnnnnnnnnnnnnnnnnnnnnnnnnnnnnnnnnnnnnnnnnnnnnnnnnnnnnnnnnnnnnnnnnnnnnnnnnnnnnnnnnnnnnnnnnnnnnnnnnnnnnnnnnnnnnnnnnnnnnnnnnnnnnnnnnnnnnnnnnnnnnnnnnnnnnnnnnnnnnnnnnnnnnnnnnnnnnnnnnnnnnnnnnnnnnnnnnnnnnnnnnnnnnnnnnnnnnnnnnnnnnnnnnnnnnnnnnnnnnnnnnnnnnnnnnnnnnnnnnnnnnnnnnnnnnnnnnnnnnnnnnnnnnnnnnnnnnnnnnnnnnnnnnnnnnnnnnnnnnnnnnnnnnnnnnnnnnnnnnnnnnnnnnnnnnnnnnnnnnnnnnnnnnnnnnnnnnnnnnnnnnnnnnnnnnnnnnnnnnnnnnnnnnnnnnnnnnnnnnnnnnnnnnnnnnnnnnnnnnnnnnnnnnnnnnnnnnnnnnnnnnnnnnnnnnnnnnnnnnnnnnnnnnnnnnnnnnnnnnnnnnnnnnnnnnnnnnnnnnnnnnnnnnnnnnnnnnnnnnnnnnnnnnnnnnnnnnnnnnnnnnnnnnnnnnnnnnnnnnnnnnnnnnnnnnnnnnnnnnnnnnnnnnnnnnnnnnnnnnnnnnnnnnnnnnnnnnnnnnnnnnnnnnnnnnnnnnnnnnnnnnnnnnnnnnnnnnnnnnnnnnnnnnnnnnnnnnnnnnnnnnnnnnnnnnnnnnnnnnnnnnnnnnnnnnnnnnnnnnnnnnnnnnnnnnnnnnnnnnnnnnnnnnnnnnnnnnnnnnnnnnnnnnnnnnnnnnnnnnnnnnnnnnnnnnnnnnnnnnnnnnnnnnnnnnnnnnnnnnnnnnnnnnnnnnnnnnnnnnnnnnnnnnnnnnnnnnnnnnnnnnnnnnnnnnnnnnnnnnnnnnnnnnnnnnnnnnnnnnnnnnnnnnnnnnnnnnnnnnnnnnnnnnnnnnnnnnnnnnnnnnnnnnnnnnnnnnnnnnnnnnnnnnnnnnnnnnnnnnnnnnnnnnnnnnnnnnnnnnnnnnnnnnnnnnnnnnnnnnnnnnnnnnnnnnnnnnnnnnnnnnnnnnnnnnnnnnnnnnnnnnnnnnnnnnnnnnnnnnnnnnnnnnnnnnnnnnnnnnnnnnnnnnnnnnnnnnnnnnnnnnnnnnnnnnnnnnnnnnnnnnnnnnnnnnnnnnnnnnnnnnnnnnnnnnnnnnnnnnnnnnnnnnnnnnnnnnnnnnnnnnnnnnnnnnnnnnnnnnnnnnnnnnnnnnnnnnnnnnnnnnnnnnnnnnnnnnnnnnnnnnnnnnnnnnnnnnnnnnnnnnnnnnnnnnnnnnnnnnnnnnnnnnnnnnnnnnnnnnnnnnnnnnnnnnnnnnnnnnnnnnnnnnnnnnnnnnnnnnnnnnnnnnnnnnnnnnnnnnnnnnnnnnnnnnnnnnnnnnnnnnnnnnnnnnnnnnnnnnnnnnnnnnnnnnnnnnnnnnnnnnnnnnnnnnnnnnnnnnnnnnnnnnnnnnnnnnnnnnnnnnnnnnnnnnnnnnnnnnnnnnnnnnnnnnnnnnnnnnnnnnnnnnnnnnnnnnnnnnnnnnnnnnnnnnnnnnnnnnnnnnnnnnnnnnnnnnnnnnnnnnnnnnnnnnnnnnnnnnnnnnnnnnnnnnnnnnnnnnnnnnnnnnnnnnnnnnnnnnnnnnnnnnnnnnnnnnnnnnnnnnnnnnnnnnnnnnnnnnnnnnnnnnnnnnnnnnnnnnnnnnnnnnnnnnnnnnnnnnnnnnnnnnnnnnnnnnnnnnnnnnnnnnnnnnnnnnnnnnnnnnnnnnnnnnnnnnnnnnnnnnnnnnnnnnnnnnnnnnnnnnnnnnnnnnnnnnnnnnnnnnnnnnnnnnnnnnnnnnnnnnnnnnnnnnnnnnnnnnnnnnnnnnnnnnnnnnnnnnnnnnnnnnnnnnnnnnnnnnnnnnnnnnnnnnnnnnnnnnnnnnnnnnnnnnnnnnnnnnnnnnnnnnnnnnnnnnnnnnnnnnnnnnnnnnnnnnnnnnnnnnnnnnnnnnnnnnnnnnnnnnnnnnnnnnnnnnnnnnnnnnnnnnnnnnnnnnnnnnnnnnnnnnnnnnnnnnnnnnnnnnnnnnnnnnnnnnnnnnnnnnnnnnnnnnnnnnnnnnnnnnnnnnnnnnnnnnnnnnnnnnnnnnnnnnnnnnnnnnnnnnnnnnnnnnnnnnnnnnnnnnnnnnnnnnnnnnnnnnnnnnnnnnnnnnnnnnnnnnnnnnnnnnnnnnnnnnnnnnnnnnnnnnnnnnnnnnnnnnnnnnnnnnnnnnnnnnnnnnnnnnnnnnnnnnnnnnnnnnnnnnnnnnnnnnnnnnnnnnnnnnnnnnnnnnnnnnnnnnnnnnnnnnnnnnnnnnnnnnnnnnnnnnnnnnnnnnnnnnnnnnnnnnnnnnnnnnnnnnnnnnnnnnnnnnnnnnnnnnnnnnnnnnnnnnnnnnnnnnnnnnnnnnnnnnnnnnnnnnnnnnnnnnnnnnnnnnnnnnnnnnnnnnnnnnnnnnnnnnnnnnnnnnnnnnnnnnnnnnnnnnnnnnnnnnnnnnnnnnnnnnnnnnnnnnnnnnnnnnnnnnnnnnnnnnnnnnnnnnnnnnnnnnnnnnnnnnnnnnnnnnnnnnnnnnnnnnnnnnnnnnnnnnnnnnnnnnnnnnnnnnnnnnnnnnnnnnnnnnnnnnnnnnnnnnnnnnnnnnnnnnnnnnnnnnnnnnnnnnnnnnnnnnnnnnnnnnnnnnnnnnnnnnnnnnnnnnnnnnnnnnnnnnnnnnnnnnnnnnnnnnnnnnnnnnnnnnnnnnnnnnnnnnnnnnnnnnnnnnnnnnnnnnnnnnnnnnnnnnnnnnnnnnnnnnnnnnnnnnnnnnnnnnnnnnnnnnnnnnnnnnnnnnnnnnnnnnnnnnnnnnnnnnnnnnnnnnnnnnnnnnnnnnnnnnnnnnnnnnnnnnnnnnnnnnnnnnnnnnnnnnnnnnnnnnnnnnnnnnnnnnnnnnnnnnnnnnnnnnnnnnnnnnnnnnnnnnnnnnnnnnnnnnnnnnnnnnnnnnnnnnnnnnnnnnnnnnnnnnnnnnnnnnnnnnnnnnnnnnnnnnnnnnnnnnnnnnnnnnnnnnnnnnnnnnnnnnnnnnnnnnnnnnnnnnnnnnnnnnnnnnnnnnnnnnnnnnnnnnnnnnnnnnnnnnnnnnnnnnnnnnnnnnnnnnnnnnnnnnnnnnnnnnnnnnnnnnnnnnnnnnnnnnnnnnnnnnnnnnnnnnnnnnnnnnnnnnnnnnnnnnnnnnnnnnnnnnnnnnnnnnnnnnnnnnnnnnnnnnnnnnnnnnnnnnnnnnnnnnnnnnnnnnnnnnnnnnnnnnnnnnnnnnnnnnnnnnnnnnnnnnnnnnnnnnnnnnnnnnnnnnnnnnnnnnnnnnnnnnnnnnnnnnnnnnnnnnnnnnnnnnnnnnnnnnnnnnnnnnnnnnnnnnnnnnnnnnnnnnnnnnnnnnnnnnnnnnnnnnnnnnnnnnnnnnnnnnnnnnnnnnnnnnnnnnnnnnnnnnnnnnnnnnnnnnnnnnnnnnnnnnnnnnnnnnnnnnnnnnnnnnnnnnnnnnnnnnnnnnnnnnnnnnnnnnnnnnnnnnnnnnnnnnnnnnnnnnnnnnnnnnnnnnnnnnnnnnnnnnnnnnnnnnnnnnnnnnnnnnnnnnnnnnnnnnnnnnnnnnnnnnnnnnnnnnnnnnnnnnnnnnnnnnnnnnnnnnnnnnnnnnnnnnnnnnnnnnnnnnnnnnnnnnnnnnnnnnnnnnnnnnnnnnnnnnnnnnnnnnnnnnnnnnnnnnnnnnnnnnnnnnnnnnnnnnnnnnnnnnnnnnnnnnnnnnnnnnnnnnnnnnnnnnnnnnnnnnnnnnnnnnnnnnnnnnnnnnnnnnnnnnnnnnnnnnnnnnnnnnnnnnnnnnnnnnnnnnnnnnnnnnnnnnnnnnnnnnnnnnnnnnnnnnnnnnnnnnnnnnnnnnnnnnnnnnnnnnnnnnnnnnnnnnnnnnnnnnnnnnnnnnnnnnnnnnnnnnnnnnnnnnnnnnnnnnnnnnnnnnnnnnnnnnnnnnnnnnnnnnnnnnnnnnnnnnnnnnnnnnnnnnnnnnnnnnnnnnnnnnnnnnnnnnnnnnnnnnnnnnnnnnnnnnnnnnnnnnnnnnnnnnnnnnnnnnnnnnnnnnnnnnnnnnnnnnnnnnnnnnnnnnnnnnnnnnnnnnnnnnnnnnnnnnnnnnnnnnnnnnnnnnnnnnnnnnnnnnnnnnnnnnnnnnnnnnnnnnnnnnnnnnnnnnnnnnnnnnnnnnnnnnnnnnnnnnnnnnnnnnnnnnnnnnnnnnnnnnnnnnnnnnnnnnnnnnnnnnnnnnnnnnnnnnnnnnnnnnnnnnnnnnnnnnnnnnnnnnnnnnnnnnnnnnnnnnnnnnnnnnnnnnnnnnnnnnnnnnnnnnnnnnnnnnnnnnnnnnnnnnnnnnnnnnnnnnnnnnnnnnnnnnnnnnnnnnnnnnnnnnnnnnnnnnnnnnnnnnnnnnnnnnnnnnnnnnnnnnnnnnnnnnnnnnnnnnnnnnnnnnnnnnnnnnnnnnnnnnnnnnnnnnnnnnnnnnnnnnnnnnnnnnnnnnnnnnnnnnnnnnnnnnnnnnnnnnnnnnnnnnnnnnnnnnnnnnnnnnnnnnnnnnnnnnnnnnnnnnnnnnnnnnnnnnnnnnnnnnnnnnnnnnnnnnnnnnnnnnnnnnnnnnnnnnnnnnnnnnnnnnnnnnnnnnnnnnnnnnnnnnnnnnnnnnnnnnnnnnnnnnnnnnnnnnnnnnnnnnnnnnnnnnnnnnnnnnnnnnnnnnnnnnnnnnnnnnnnnnnnnnnnnnnnnnnnnnnnnnnnnnnnnnnnnnnnnnnnnnnnnnnnnnnnnnnnnnnnnnnnnnnnnnnnnnnnnnnnnnnnnnnnnnnnnnnnnnnnnnnnnnnnnnnnnnnnnnnnnnnnnnnnnnnnnnnnnnnnnnnnnnnnnnnnnnnnnnnnnnnnnnnnnnnnnnnnnnnnnnnnnnnnnnnnnnnnnnnnnnnnnnnnnnnnnnnnnnnnnnnnnnnnnnnnnnnnnnnnnnnnnnnnnnnnnnnnnnnnnnnnnnnnnnnnnnnnnnnnnnnnnnnnnnnnnnnnnnnnnnnnnnnnnnnnnnnnnnnnnnnnnnnnnnnnnnnnnnnnnnnnnnnnnnnnnnnnnnnnnnnnnnnnnnnnnnnnnnnnnnnnnnnnnnnnnnnnnnnnnnnnnnnnnnnnnnnnnnnnnnnnnnnnnnnnnnnnnnnnnnnnnnnnnnnnnnnnnnnnnnnnnnnnnnnnnnnnnnnnnnnnnnnnnnnnnnnnnnnnnnnnnnnnnnnnnnnnnnnnnnnnnnnnnnnnnnnnnnnnnnnnnnnnnnnnnnnnnnnnnnnnnnnnnnnnnnnnnnnnnnnnnnnnnnnnnnnnnnnnnnnnnnnnnnnnnnnnnnnnnnnnnnnnnnnnnnnnnnnnnnnnnnnnnnnnnnnnnnnnnnnnnnnnnnnnnnnnnnnnnnnnnnnnnnnnnnnnnnnnnnnnnnnnnnnnnnnnnnnnnnnnnnnnnnnnnnnnnnnnnnnnnnnnnnnnnnnnnnnnnnnnnnnnnnnnnnnnnnnnnnnnnnnnnnnnnnnnnnnnnnnnnnnnnnnnnnnnnnnnnnnnnnnnnnnnnnnnnnnnnnnnnnnnnnnnnnnnnnnnnnnnnnnnnnnnnnnnnnnnnnnnnnnnnnnnnnnnnnnnnnnnnnnnnnnnnnnnnnnnnnnnnnnnnnnnnnnnnnnnnnnnnnnnnnnnnnnnnnnnnnnnnnnnnnnnnnnnnnnnnnnnnnnnnnnnnnnnnnnnnnnnnnnnnnnnnnnnnnnnnnnnnnnnnnnnnnnnnnnnnnnnnnnnnnnnnnnnnnnnnnnnnnnnnnnnnnnnnnnnnnnnnnnnnnnnnnnnnnnnnnnnnnnnnnnnnnnnnnnnnnnnnnnnnnnnnnnnnnnnnnnnnnnnnnnnnnnnnnnnnnnnnnnnnnnnnnnnnnnnnnnnnnnnnnnnnnnnnnnnnnnnnnnnnnnnnnnnnnnnnnnnnnnnnnnnnnnnnnnnnnnnnnnnnnnnnnnnnnnnnnnnnnnnnnnnnnnnnnnnnnnnnnnnnnnnnnnnnnnnnnnnnnnnnnnnnnnnnnnnnnnnnnnnnnnnnnnnnnnnnnnnnnnnnnnnnnnnnnnnnnnnnnnnnnnnnnnnnnnnnnnnnnnnnnnnnnnnnnnnnnnnnnnnnnnnnnnnnnnnnnnnnnnnnnnnnnnnnnnnnnnnnnnnnnnnnnnnnnnnnnnnnnnnnnnnnnnnnnnnnnnnnnnnnnnnnnnnnnnnnnnnnnnnnnnnnnnnnnnnnnnnnnnnnnnnnnnnnnnnnnnnnnnnnnnnnnnnnnnnnnnnnnnnnnnnnnnnnnnnnnnnnnnnnnnnnnnnnnnnnnnnnnnnnnnnnnnnnnnnnnnnnnnnnnnnnnnnnnnnnnnnnnnnnnnnnnnnnnnnnnnnnnnnnnnnnnnnnnnnnnnnnnnnnnnnnnnnnnnnnnnnnnnnnnnnnnnnnnnnnnnnnnnnnnnnnnnnnnnnnnnnnnnnnnnnnnnnnnnnnnnnnnnnnnnnnnnnnnnnnnnnnnnnnnnnnnnnnnnnnnnnnnnnnnnnnnnnnnnnnnnnnnnnnnnnnnnnnnnnnnnnnnnnnnnnnnnnnnnnnnnnnnnnnnnnnnnnnnnnnnnnnnnnnnnnnnnnnnnnnnnnnnnnnnnnnnnnnnnnnnnnnnnnnnnnnnnnnnnnnnnnnnnnnnnnnnnnnnnnnnnnnnnnnnnnnnnnnnnnnnnnnnnnnnnnnnnnnnnnnnnnnnnnnnnnnnnnnnnnnnnnnnnnnnnnnnnnnnnnnnnnnnnnnnnnnnnnnnnnnnnnnnnnnnnnnnnnnnnnnnnnnnnnnnnnnnnnnnnnnnnnnnnnnnnnnnnnnnnnnnnnnnnnnnnnnnnnnnnnnnnnnnnnnnnnnnnnnnnnnnnnnnnnnnnnnnnnnnnnnnnnnnnnnnnnnnnnnnnnnnnnnnnnnnnnnnnnnnnnnnnnnnnnnnnnnnnnnnnnnnnnnnnnnnnnnnnnnnnnnnnnnnnnnnnnnnnnnnnnnnnnnnnnnnnnnnnnnnnnnnnnnnnnnnnnnnnnnnnnnnnnnnnnnnnnnnnnnnnnnnnnnnnnnnnnnnnnnnnnnnnnnnnnnnnnnnnnnnnnnnnnnnnnnnnnnnnnnnnnnnnnnnnnnnnnnnnnnnnnnnnnnnnnnnnnnnnnnnnnnnnnnnnnnnnnnnnnnnnnnnnnnnnnnnnnnnnnnnnnnnnnnnnnnnnnnnnnnnnnnnnnnnnnnnnnnnnnnnnnnnnnnnnnnnnnnnnnnnnnnnnnnnnnnnnnnnnnnnnnnnnnnnnnnnnnnnnnnnnnnnnnnnnnnnnnnnnnnnnnnnnnnnnnnnnnnnnnnnnnnnnnnnnnnnnnnnnnnnnnnnnnnnnnnnnnnnnnnnnnnnnnnnnnnnnnnnnnnnnnnnnnnnnnnnnnnnnnnnnnnnnnnnnnnnnnnnnnnnnnnnnnnnnnnnnnnnnnnnnnnnnnnnnnnnnnnnnnnnnnnnnnnnnnnnnnnnnnnnnnnnnnnnnnnnnnnnnnnnnnnnnnnnnnnnnnnnnnnnnnnnnnnnnnnnnnnnnnnnnnnnnnnnnnnnnnnnnnnnnnnnnnnnnnnnnnnnnnnnnnnnnnnnnnnnnnnnnnnnnnnnnnnnnnnnnnnnnnnnnnnnnnnnnnnnnnnnnnnnnnnnnnnnnnnnnnnnnnnnnnnnnnnnnnnnnnnnnnnnnnnnnnnnnnnnnnnnnnnnnnnnnnnnnnnnnnnnnnnnnnnnnnnnnnnnnnnnnnnnnnnnnnnnnnnnnnnnnnnnnnnnnnnnnnnnnnnnnnnnnnnnnnnnnnnnnnnnnnnnnnnnnnnnnnnnnnnnnnnnnnnnnnnnnnnnnnnnnnnnnnnnnnnnnnnnnnnnnnnnnnnnnnnnnnnnnnnnnnnnnnnnnnnnnnnnnnnnnnnnnnnnnnnnnnnnnnnnnnnnnnnnnnnnnnnnnnnnnnnnnnnnnnnnnnnnnnnnnnnnnnnnnnnnnnnnnnnnnnnnnnnnnnnnnnnnnnnnnnnnnnnnnnnnnnnnnnnnnnnnnnnnnnnnnnnnnnnnnnnnnnnnnnnnnnnnnnnnnnnnnnnnnnnnnnnnnnnnnnnnnnnnnnnnnnnnnnnnnnnnnnnnnnnnnnnnnnnnnnnnnnnnnnnnnnnnnnnnnnnnnnnnnnnnnnnnnnnnnnnnnnnnnnnnnnnnnnnnnnnnnnnnnnnnnnnnnnnnnnnnnnnnnnnnnnnnnnnnnnnnnnnnnnnnnnnnnnnnnnnnnnnnnnnnnnnnnnnnnnnnnnnnnnnnnnnnnnnnnnnnnnnnnnnnnnnnnnnnnnnnnnnnnnnnnnnnnnnnnnnnnnnnnnnnnnnnnnnnnnnnnnnnnnnnnnnnnnnnnnnnnnnnnnnnnnnnnnnnnnnnnnnnnnnnnnnnnnnnnnnnnnnnnnnnnnnnnnnnnnnnnnnnnnnnnnnnnnnnnnnnnnnnnnnnnnnnnnnnnnnnnnnnnnnnnnnnnnnnnnnnnnnnnnnnnnnnnnnnnnnnnnnnnnnnnnnnnnnnnnnnnnnnnnnnnnnnnnnnnnnnnnnnnnnnnnnnnnnnnnnnnnnnnnnnnnnnnnnnnnnnnnnnnnnnnnnnnnnnnnnnnnnnnnnnnnnnnnnnnnnnnnnnnnnnnnnnnnnnnnnnnnnnnnnnnnnnnnnnnnnnnnnnnnnnnnnnnnnnnnnnnnnnnnnnnnnnnnnnnnnnnnnnnnnnnnnnnnnnnnnnnnnnnnnnnnnnnnnnnnnnnnnnnnnnnnnnnnnnnnnnnnnnnnnnnnnnnnnnnnnnnnnnnnnnnnnnnnnnnnnnnnnnnnnnnnnnnnnnnnnnnnnnnnnnnnnnnnnnnnnnnnnnnnnnnnnnnnnnnnnnnnnnnnnnnnnnnnnnnnnnnnnnnnnnnnnnnnnnnnnnnnnnnnnnnnnnnnnnnnnnnnnnnnnnnnnnnnnnnnnnnnnnnnnnnnnnnnnnnnnnnnnnnnnnnnnnnnnnnnnnnnnnnnnnnnnnnnnnnnnnnnnnnnnnnnnnnnnnnnnnnnnnnnnnnnnnnnnnnnnnnnnnnnnnnnnnnnnnnnnnnnnnnnnnnnnnnnnnnnnnnnnnnnnnnnnnnnnnnnnnnnnnnnnnnnnnnnnnnnnnnnnnnnnnnnnnnnnnnnnnnnnnnnnnnnnnnnnnnnnnnnnnnnnnnnnnnnnnnnnnnnnnnnnnnnnnnnnnnnnnnnnnnnnnnnnnnnnnnnnnnnnnnnnnnnnnnnnnnnnnnnnnnnnnnnnnnnnnnnnnnnnnnnnnnnnnnnnnnnnnnnnnnnnnnnnnnnnnnnnnnnnnnnnnnnnnnnnnnnnnnnnnnnnnnnnnnnnnnnnnnnnnnnnnnnnnnnnnnnnnnnnnnnnnnnnnnnnnnnnnnnnnnnnnnnnnnnnnnnnnnnnnnnnnnnnnnnnnnnnnnnnnnnnnnnnnnnnnnnnnnnnnnnnnnnnnnnnnnnnnnnnnnnnnnnnnnnnnnnnnnnnnnnnnnnnnnnnnnnnnnnnnnnnnnnnnnnnnnnnnnnnnnnnnnnnnnnnnnnnnnnnnnnnnnnnnnnnnnnnnnnnnnnnnnnnnnnnnnnnnnnnnnnnnnnnnnnnnnnnnnnnnnnnnnnnnnnnnnnnnnnnnnnnnnnnnnnnnnnnnnnnnnnnnnnnnnnnnnnnnnnnnnnnnnnnnnnnnnnnnnnnnnnnnnnnnnnnnnnnnnnnnnnnnnnnnnnnnnnnnnnnnnnnnnnnnnnnnnnnnnnnnnnnnnnnnnnnnnnnnnnnnnnnnnnnnnnnnnnnnnnnnnnnnnnnnnnnnnnnnnnnnnnnnnnnnnnnnnnnnnnnnnnnnnnnnnnnnnnnnnnnnnnnnnnnnnnnnnnnnnnnnnnnnnnnnnnnnnnnnnnnnnnnnnnnnnnnnnnnnnnnnnnnnnnnnnnnnnnnnnnnnnnnnnnnnnnnnnnnnnnnnnnnnnnnnnnnnnnnnnnnnnnnnnnnnnnnnnnnnnnnnnnnnnnnnnnnnnnnnnnnnnnnnnnnnnnnnnnnnnnnnnnnnnnnnnnnnnnnnnnnnnnnnnnnnnnnnnnnnnnnnnnnnnnnnnnnnnnnnnnnnnnnnnnnnnnnnnnnnnnnnnnnnnnnnnnnnnnnnnnnnnnnnnnnnnnnnnnnnnnnnnnnnnnnnnnnnnnnnnnnnnnnnnnnnnnnnnnnnnnnnnnnnnnnnnnnnnnnnnnnnnnnnnnnnnnnnnnnnnnnnnnnnnnnnnnnnnnnnnnnnnnnnnnnnnnnnnnnnnnnnnnnnnnnnnnnnnnnnnnnnnnnnnnnnnnnnnnnnnnnnnnnnnnnnnnnnnnnnnnnnnnnnnnnnnnnnnnnnnnnnnnnnnnnnnnnnnnnnnnnnnnnnnnnnnnnnnnnnnnnnnnnnnnnnnnnnnnnnnnnnnnnnnnnnnnnnnnnnnnnnnnnnnnnnnnnnnnnnnnnnnnnnnnnnnnnnnnnnnnnnnnnnnnnnnnnnnnnnnnnnnnnnnnnnnnnnnnnnnnnnnnnnnnnnnnnnnnnnnnnnnnnnnnnnnnnnnnnnnnnnnnnnnnnnnnnnnnnnnnnnnnnnnnnnnnnnnnnnnnnnnnnnnnnnnnnnnnnnnnnnnnnnnnnnnnnnnnnnnnnnnnnnnnnnnnnnnnnnnnnnnnnnnnnnnnnnnnnnnnnnnnnnnnnnnnnnnnnnnnnnnnnnnnnnnnnnnnnnnnnnnnnnnnnnnnnnnnnnnnnnnnnnnnnnnnnnnnnnnnnnnnnnnnnnnnnnnnnnnnnnnnnnnnnnnnnnnnnnnnnnnnnnnnnnnnnnnnnnnnnnnnnnnnnnnnnnnnnnnnnnnnnnnnnnnnnnnnnnnnnnnnnnnnnnnnnnnnnnnnnnnnnnnnnnnnnnnnnnnnnnnnnnnnnnnnnnnnnnnnnnnnnnnnnnnnnnnnnnnnnnnnnnnnnnnnnnnnnnnnnnnnnnnnnnnnnnnnnnnnnnnnnnnnnnnnnnnnnnnnnnnnnnnnnnnnnnnnnnnnnnnnnnnnnnnnnnnnnnnnnnnnnnnnnnnnnnnnnnnnnnnnnnnnnnnnnnnnnnnnnnnnnnnnnnnnnnnnnnnnnnnnnnnnnnnnnnnnnnnnnnnnnnnnnnnnnnnnnnnnnnnnnnnnnnnnnnnnnnnnnnnnnnnnnnnnnnnnnnnnnnnnnnnnnnnnnnnnnnnnnnnnnnnnnnnnnnnnnnnnnnnnnnnnnnnnnnnnnnnnnnnnnnnnnnnnnnnnnnnnnnnnnnnnnnnnnnnnnnnnnnnnnnnnnnnnnnnnnnnnnnnnnnnnnnnnnnnnnnnnnnnnnnnnnnnnnnnnnnnnnnnnnnnnnnnnnnnnnnnnnnnnnnnnnnnnnnnnnnnnnnnnnnnnnnnnnnnnnnnnnnnnnnnnnnnnnnnnnnnnnnnnnnnnnnnnnnnnnnnnnnnnnnnnnnnnnnnnnnnnnnnnnnnnnnnnnnnnnnnnnnnnnnnnnnnnnnnnnnnnnnnnnnnnnnnnnnnnnnnnnnnnnnnnnnnnnnnnnnnnnnnnnnnnnnnnnnnnnnnnnnnnnnnnnnnnnnnnnnnnnnnnnnnnnnnnnnnnnnnnnnnnnnnnnnnnnnnnnnnnnnnnnnnnnnnnnnnnnnnnnnnnnnnnnnnnnnnnnnnnnnnnnnnnnnnnnnnnnnnnnnnnnnnnnnnnnnnnnnnnnnnnnnnnnnnnnnnnnnnnnnnnnnnnnnnnnnnnnnnnnnnnnnnnnnnnnnnnnnnnnnnnnnnnnnnnnnnnnnnnnnnnnnnnnnnnnnnnnnnnnnnnnnnnnnnnnnnnnnnnnnnnnnnnnnnnnnnnnnnnnnnnnnnnnnnnnnnnnnnnnnnnnnnnnnnnnnnnnnnnnnnnnnnnnnnnnnnnnnnnnnnnnnnnnnnnnnnnnnnnnnnnnnnnnnnnnnnnnnnnnnnnnnnnnnnnnnnnnnnnnnnnnnnnnnnnnnnnnnnnnnnnnnnnnnnnnnnnnnnnnnnnnnnnnnnnnnnnnnnnnnnnnnnnnnnnnnnnnnnnnnnnnnnnnnnnnnnnnnnnnnnnnnnnnnnnnnnnnnnnnnnnnnnnnnnnnnnnnnnnnnnnnnnnnnnnnnnnnnnnnnnnnnnnnnnnnnnnnnnnnnnnnnnnnnnnnnnnnnnnnnnnnnnnnnnnnnnnnnnnnnnnnnnnnnnnnnnnnnnnnnnnnnnnnnnnnnnnnnnnnnnnnnnnnnnnnnnnnnnnnnnnnnnnnnnnnnnnnnnnnnnnnnnnnnnnnnnnnnnnnnnnnnnnnnnnnnnnnnnnnnnnnnnnnnnnnnnnnnnnnnnnnnnnnnnnnnnnnnnnnnnnnnnnnnnnnnnnnnnnnnnnnnnnnnnnnnnnnnnnnnnnnnnnnnnnnnnnnnnnnnnnnnnnnnnnnnnnnnnnnnnnnnnnnnnnnnnnnnnnnnnnnnnnnnnnnnnnnnnnnnnnnnnnnnnnnnnnnnnnnnnnnnnnnnnnnnnnnnnnnnnnnnnnnnnnnnnnnnnnnnnnnnnnnnnnnnnnnnnnnnnnnnnnnnnnnnnnnnnnnnnnnnnnnnnnnnnnnnnnnnnnnnnnnnnnnnnnnnnnnnnnnnnnnnnnnnnnnnnnnnnnnnnnnnnnnnnnnnnnnnnnnnnnnnnnnnnnnnnnnnnnnnnnnnnnnnnnnnnnnnnnnnnnnnnnnnnnnnnnnnnnnnnnnnnnnnnnnnnnnnnnnnnnnnnnnnnnnnnnnnnnnnnnnnnnnnnnnnnnnnnnnnnnnnnnnnnnnnnnnnnnnnnnnnnnnnnnnnnnnnnnnnnnnnnnnnnnnnnnnnnnnnnnnnnnnnnnnnnnnnnnnnnnnnnnnnnnnnnnnnnnnnnnnnnnnnnnnnnnnnnnnnnnnnnnnnnnnnnnnnnnnnnnnnnnnnnnnnnnnnnnnnnnnnnnnnnnnnnnnnnnnnnnnnnnnnnnnnnnnnnnnnnnnnnnnnnnnnnnnnnnnnnnnnnnnnnnnnnnnnnnnnnnnnnnnnnnnnnnnnnnnnnnnnnnnnnnnnnnnnnnnnnnnnnnnnnnnnnnnnnnnnnnnnnnnnnnnnnnnnnnnnnnnnnnnnnnnnnnnnnnnnnnnnnnnnnnnnnnnnnnnnnnnnnnnnnnnnnnnnnnnnnnnnnnnnnnnnnnnnnnnnnnnnnnnnnnnnnnnnnnnnnnnnnnnnnnnnnnnnnnnnnnnnnnnnnnnnnnnnnnnnnnnnnnnnnnnnnnnnnnnnnnnnnnnnnnnnnnnnnnnnnnnnnnnnnnnnnnnnnnnnnnnnnnnnnnnnnnnnnnnnnnnnnnnnnnnnnnnnnnnnnnnnnnnnnnnnnnnnnnnnnnnnnnnnnnnnnnnnnnnnnnnnnnnnnnnnnnnnnnnnnnnnnnnnnnnnnnnnnnnnnnnnnnnnnnnnnnnnnnnnnnnnnnnnnnnnnnnnnnnnnnnnnnnnnnnnnnnnnnnnnnnnnnnnnnnnnnnnnnnnnnnnnnnnnnnnnnnnnnnnnnnnnnnnnnnnnnnnnnnnnnnnnnnnnnnnnnnnnnnnnnnnnnnnnnnnnnnnnnnnnnnnnnnnnnnnnnnnnnnnnnnnnnnnnnnnnnnnnnnnnnnnnnnnnnnnnnnnnnnnnnnnnnnnnnnnnnnnnnnnnnnnnnnnnnnnnnnnnnnnnnnnnnnnnnnnnnnnnnnnnnnnnnnnnnnnnnnnnnnnnnnnnnnnnnnnnnnnnnnnnnnnnnnnnnnnnnnnnnnnnnnnnnnnnnnnnnnnnnnnnnnnnnnnnnnnnnnnnnnnnnnnnnnnnnnnnnnnnnnnnnnnnnnnnnnnnnnnnnnnnnnnnnnnnnnnnnnnnnnnnnnnnnnnnnnnnnnnnnnnnnnnnnnnnnnnnnnnnnnnnnnnnnnnnnnnnnnnnnnnnnnnnnnnnnnnnnnnnnnnnnnnnnnnnnnnnnnnnnnnnnnnnnnnnnnnnnnnnnnnnnnnnnnnnnnnnnnnnnnnnnnnnnnnnnnnnnnnnnnnnnnnnnnnnnnnnnnnnnnnnnnnnnnnnnnnnnnnnnnnnnnnnnnnnnnnnnnnnnnnnnnnnnnnnnnnnnnnnnnnnnnnnnnnnnnnnnnnnnnnnnnnnnnnnnnnnnnnnnnnnnnnnnnnnnnnnnnnnnnnnnnnnnnnnnnnnnnnnnnnnnnnnnnnnnnnnnnnnnnnnnnnnnnnnnnnnnnnnnnnnnnnnnnnnnnnnnnnnnnnnnnnnnnnnnnnnnnnnnnnnnnnnnnnnnnnnnnnnnnnnnnnnnnnnnnnnnnnnnnnnnnnnnnnnnnnnnnnnnnnnnnnnnnnnnnnnnnnnnnnnnnnnnnnnnnnnnnnnnnnnnnnnnnnnnnnnnnnnnnnnnnnnnnnnnnnnnnnnnnnnnnnnnnnnnnnnnnnnnnnnnnnnnnnnnnnnnnnnnnnnnnnnnnnnnnnnnnnnnnnnnnnnnnnnnnnnnnnnnnnnnnnnnnnnnnnnnnnnnnnnnnnnnnnnnnnnnnnnnnnnnnnnnnnnnnnnnnnnnnnnnnnnnnnnnnnnnnnnnnnnnnnnnnnnnnnnnnnnnnnnnnnnnnnnnnnnnnnnnnnnnnnnnnnnnnnnnnnnnnnnnnnnnnnnnnnnnnnnnnnnnnnnnnnnnnnnnnnnnnnnnnnnnnnnnnnnnnnnnnnnnnnnnnnnnnnnnnnnnnnnnnnnnnnnnnnnnnnnnnnnnnnnnnnnnnnnnnnnnnnnnnnnnnnnnnnnnnnnnnnnnnnnnnnnnnnnnnnnnnnnnnnnnnnnnnnnnnnnnnnnnnnnnnnnnnnnnnnnnnnnnnnnnnnnnnnnnnnnnnnnnnnnnnnnnnnnnnnnnnnnnnnnnnnnnnnnnnnnnnnnnnnnnnnnnnnnnnnnnnnnnnnnnnnnnnnnnnnnnnnnnnnnnnnnnnnnnnnnnnnnnnnnnnnnnnnnnnnnnnnnnnnnnnnnnnnnnnnnnnnnnnnnnnnnnnnnnnnnnnnnnnnnnnnnnnnnnnnnnnnnnnnnnnnnnnnnnnnnnnnnnnnnnnnnnnnnnnnnnnnnnnnnnnnnnnnnnnnnnnnnnnnnnnnnnnnnnnnnnnnnnnnnnnnnnnnnnnnnnnnnnnnnnnnnnnnnnnnnnnnnnnnnnnnnnnnnnnnnnnnnnnnnnnnnnnnnnnnnnnnnnnnnnnnnnnnnnnnnnnnnnnnnnnnnnnnnnnnnnnnnnnnnnnnnnnnnnnnnnnnnnnnnnnnnnnnnnnnnnnnnnnnnnnnnnnnnnnnnnnnnnnnnnnnnnnnnnnnnnnnnnnnnnnnnnnnnnnnnnnnnnnnnnnnnnnnnnnnnnnnnnnnnnnnnnnnnnnnnnnnnnnnnnnnnnnnnnnnnnnnnnnnnnnnnnnnnnnnnnnnnnnnnnnnnnnnnnnnnnnnnnnnnnnnnnnnnnnnnnnnnnnnnnnnnnnnnnnnnnnnnnnnnnnnnnnnnnnnnnnnnnnnnnnnnnnnnnnnnnnnnnnnnnnnnnnnnnnnnnnnnnnnnnnnnnnnnnnnnnnnnnnnnnnnnnnnnnnnnnnnnnnnnnnnnnnnnnnnnnnnnnnnnnnnnnnnnnnnnnnnnnnnnnnnnnnnnnnnnnnnnnnnnnnnnnnnnnnnnnnnnnnnnnnnnnnnnnnnnnnnnnnnnnnnnnnnnnnnnnnnnnnnnnnnnnnnnnnnnnnnnnnnnnnnnnnnnnnnnnnnnnnnnnnnnnnnnnnnnnnnnnnnnnnnnnnnnnnnnnnnnnnnnnnnnnnnnnnnnnnnnnnnnnnnnnnnnnnnnnnnnnnnnnnnnnnnnnnnnnnnnnnnnnnnnnnnnnnnnnnnnnnnnnnnnnnnnnnnnnnnnnnnnnnnnnnnnnnnnnnnnnnnnnnnnnnnnnnnnnnnnnnnnnnnnnnnnnnnnnnnnnnnnnnnnnnnnnnnnnnnnnnnnnnnnnnnnnnnnnnnnnnnnnnnnnnnnnnnnnnnnnnnnnnnnnnnnnnnnnnnnnnnnnnnnnnnnnnnnnnnnnnnnnnnnnnnnnnnnnnnnnnnnnnnnnnnnnnnnnnnnnnnnnnnnnnnnnnnnnnnnnnnnnnnnnnnnnnnnnnnnnnnnnnnnnnnnnnnnnnnnnnnnnnnnnnnnnnnnnnnnnnnnnnnnnnnnnnnnnnnnnnnnnnnnnnnnnnnnnnnnnnnnnnnnnnnnnnnnnnnnnnnnnnnnnnnnnnnnnnnnnnnnnnnnnnnnnnnnnnnnnnnnnnnnnnnnnnnnnnnnnnnnnnnnnnnnnnnnnnnnnnnnnnnnnnnnnnnnnnnnnnnnnnnnnnnnnnnnnnnnnnnnnnnnnnnnnnnnnnnnnnnnnnnnnnnnnnnnnnnnnnnnnnnnnnnnnnnnnnnnnnnnnnnnnnnnnnnnnnnnnnnnnnnnnnnnnnnnnnnnnnnnnnnnnnnnnnnnnnnnnnnnnnnnnnnnnnnnnnnnnnnnnnnnnnnnnnnnnnnnnnnnnnnnnnnnnnnnnnnnnnnnnnnnnnnnnnnnnnnnnnnnnnnnnnnnnnnnnnnnnnnnnnnnnnnnnnnnnnnnnnnnnnnnnnnnnnnnnnnnnnnnnnnnnnnnnnnnnnnnnnnnnnnnnnnnnnnnnnnnnnnnnnnnnnnnnnnnnnnnnnnnnnnnnnnnnnnnnnnnnnnnnnnnnnnnnnnnnnnnnnnnnnnnnnnnnnnnnnnnnnnnnnnnnnnnnnnnnnnnnnnnnnnnnnnnnnnnnnnnnnnnnnnnnnnnnnnnnnnnnnnnnnnnnnnnnnnnnnnnnnnnnnnnnnnnnnnnnnnnnnnnnnnnnnnnnnnnnnnnnnnnnnnnnnnnnnnnnnnnnnnnnnnnnnnnnnnnnnnnnnnnnnnnnnnnnnnnnnnnnnnnnnnnnnnnnnnnnnnnnnnnnnnnnnnnnnnnnnnnnnnnnnnnnnnnnnnnnnnnnnnnnnnnnnnnnnnnnnnnnnnnnnnnnnnnnnnnnnnnnnnnnnnnnnnnnnnnnnnnnnnnnnnnnnnnnnnnnnnnnnnnnnnnnnnnnnnnnnnnnnnnnnnnnnnnnnnnnnnnnnnnnnnnnnnnnnnnnnnnnnnnnnnnnnnnnnnnnnnnnnnnnnnnnnnnnnnnnnnnnnnnnnnnnnnnnnnnnnnnnnnnnnnnnnnnnnnnnnnnnnnnnnnnnnnnnnnnnnnnnnnnnnnnnnnnnnnnnnnnnnnnnnnnnnnnnnnnnnnnnnnnnnnnnnnnnnnnnnnnnnnnnnnnnnnnnnnnnnnnnnnnnnnnnnnnnnnnnnnnnnnnnnnnnnnnnnnnnnnnnnnnnnnnnnnnnnnnnnnnnnnnnnnnnnnnnnnnnnnnnnnnnnnnnnnnnnnnnnnnnnnnnnnnnnnnnnnnnnnnnnnnnnnnnnnnnnnnnnnnnnnnnnnnnnnnnnnnnnnnnnnnnnnnnnnnnnnnnnnnnnnnnnnnnnnnnnnnnnnnnnnnnnnnnnnnnnnnnnnnnnnnnnnnnnnnnnnnnnnnnnnnnnnnnnnnnnnnnnnnnnnnnnnnnnnnnnnnnnnnnnnnnnnnnnnnnnnnnnnnnnnnnnnnnnnnnnnnnnnnnnnnnnnnnnnnnnnnnnnnnnnnnnnnnnnnnnnnnnnnnnnnnnnnnnnnnnnnnnnnnnnnnnnnnnnnnnnnnnnnnnnnnnnnnnnnnnnnnnnnnnnnnnnnnnnnnnnnnnnnnnnnnnnnnnnnnnnnnnnnnnnnnnnnnnnnnnnnnnnnnnnnnnnnnnnnnnnnnnnnnnnnnnnnnnnnnnnnnnnnnnnnnnnnnnnnnnnnnnnnnnnnnnnnnnnnnnnnnnnnnnnnnnnnnnnnnnnnnnnnnnnnnnnnnnnnnnnnnnnnnnnnnnnnnnnnnnnnnnnnnnnnnnnnnnnnnnnnnnnnnnnnnnnnnnnnnnnnnnnnnnnnnnnnnnnnnnnnnnnnnnnnnnnnnnnnnnnnnnnnnnnnnnnnnnnnnnnnnnnnnnnnnnnnnnnnnnnnnnnnnnnnnnnnnnnnnnnnnnnnnnnnnnnnnnnnnnnnnnnnnnnnnnnnnnnnnnnnnnnnnnnnnnnnnnnnnnnnnnnnnnnnnnnnnnnnnnnnnnnnnnnnnnnnnnnnnnnnnnnnnnnnnnnnnnnnnnnnnnnnnnnnnnnnnnnnnnnnnnnnnnnnnnnnnnnnnnnnnnnnnnnnnnnnnnnnnnnnnnnnnnnnnnnnnnnnnnnnnnnnnnnnnnnnnnnnnnnnnnnnnnnnnnnnnnnnnnnnnnnnnnnnnnnnnnnnnnnnnnnnnnnnnnnnnnnnnnnnnnnnnnnnnnnnnnnnnnnnnnnnnnnnnnnnnnnnnnnnnnnnnnnnnnnnnnnnnnnnnnnnnnnnnnnnnnnnnnnnnnnnnnnnnnnnnnnnnnnnnnnnnnnnnnnnnnnnnnnnnnnnnnnnnnnnnnnnnnnnnnnnnnnnnnnnnnnnnnnnnnnnnnnnnnnnnnnnnnnnnnnnnnnnnnnnnnnnnnnnnnnnnnnnnnnnnnnnnnnnnnnnnnnnnnnnnnnnnnnnnnnnnnnnnnnnnnnnnnnnnnnnnnnnnnnnnnnnnnnnnnnnnnnnnnnnnnnnnnnnnnnnnnnnnnnnnnnnnnnnnnnnnnnnnnnnnnnnnnnnnnnnnnnnnnnnnnnnnnnnnnnnnnnnnnnnnnnnnnnnnnnnnnnnnnnnnnnnnnnnnnnnnnnnnnnnnnnnnnnnnnnnnnnnnnnnnnnnnnnnnnnnnnnnnnnnnnnnnnnnnnnnnnnnnnnnnnnnnnnnnnnnnnnnnnnnnnnnnnnnnnnnnnnnnnnnnnnnnnnnnnnnnnnnnnnnnnnnnnnnnnnnnnnnnnnnnnnnnnnnnnnnnnnnnnnnnnnnnnnnnnnnnnnnnnnnnnnnnnnnnnnnnnnnnnnnnnnnnnnnnnnnnnnnnnnnnnnnnnnnnnnnnnnnnnnnnnnnnnnnnnnnnnnnnnnnnnnnnnnnnnnnnnnnnnnnnnnnnnnnnnnnnnnnnnnnnnnnnnnnnnnnnnnnnnnnnnnnnnnnnnnnnnnnnnnnnnnnnnnnnnnnnnnnnnnnnnnnnnnnnnnnnnnnnnnnnnnnnnnnnnnnnnnnnnnnnnnnnnnnnnnnnnnnnnnnnnnnnnnnnnnnnnnnnnnnnnnnnnnnnnnnnnnnnnnnnnnnnnnnnnnnnnnnnnnnnnnnnnnnnnnnnnnnnnnnnnnnnnnnnnnnnnnnnnnnnnnnnnnnnnnnnnnnnnnnnnnnnnnnnnnnnnnnnnnnnnnnnnnnnnnnnnnnnnnnnnnnnnnnnnnnnnnnnnnnnnnnnnnnnnnnnnnnnnnnnnnnnnnnnnnnnnnnnnnnnnnnnnnnnnnnnnnnnnnnnnnnnnnnnnnnnnnnnnnnnnnnnnnnnnnnnnnnnnnnnnnnnnnnnnnnnnnnnnnnnnnnnnnnnnnnnnnnnnnnnnnnnnnnnnnnnnnnnnnnnnnnnnnnnnnnnnnnnnnnnnnnnnnnnnnnnnnnnnnnnnnnnnnnnnnnnnnnnnnnnnnnnnnnnnnnnnnnnnnnnnnnnnnnnnnnnnnnnnnnnnnnnnnnnnnnnnnnnnnnnnnnnnnnnnnnnnnnnnnnnnnnnnnnnnnnnnnnnnnnnnnnnnnnnnnnnnnnnnnnnnnnnnnnnnnnnnnnnnnnnnnnnnnnnnnnnnnnnnnnnnnnnnnnnnnnnnnnnnnnnnnnnnnnnnnnnnnnnnnnnnnnnnnnnnnnnnnnnnnnnnnnnnnnnnnnnnnnnnnnnnnnnnnnnnnnnnnnnnnnnnnnnnnnnnnnnnnnnnnnnnnnnnnnnnnnnnnnnnnnnnnnnnnnnnnnnnnnnnnnnnnnnnnnnnnnnnnnnnnnnnnnnnnnnnnnnnnnnnnnnnnnnnnnnnnnnnnnnnnnnnnnnnnnnnnnnnnnnnnnnnnnnnnnnnnnnnnnnnnnnnnnnnnnnnnnnnnnnnnnnnnnnnnnnnnnnnnnnnnnnnnnnnnnnnnnnnnnnnnnnnnnnnnnnnnnnnnnnnnnnnnnnnnnnnnnnnnnnnnnnnnnnnnnnnnnnnnnnnnnnnnnnnnnnnnnnnnnnnnnnnnnnnnnnnnnnnnnnnnnnnnnnnnnnnnnnnnnnnnnnnnnnnnnnnnnnnnnnnnnnnnnnnnnnnnnnnnnnnnnnnnnnnnnnnnnnnnnnnnnnnnnnnnnnnnnnnnnnnnnnnnnnnnnnnnnnnnnnnnnnnnnnnnnnnnnnnnnnnnnnnnnnnnnnnnnnnnnnnnnnnnnnnnnnnnnnnnnnnnnnnnnnnnnnnnnnnnnnnnnnnnnnnnnnnnnnnnnnnnnnnnnnnnnnnnnnnnnnnnnnnnnnnnnnnnnnnnnnnnnnnnnnnnnnnnnnnnnnnnnnnnnnnnnnnnnnnnnnnnnnnnnnnnnnnnnnnnnnnnnnnnnnnnnnnnnnnnnnnnnnnnnnnnnnnnnnnnnnnnnnnnnnnnnnnnnnnnnnnnnnnnnnnnnnnnnnnnnnnnnnnnnnnnnnnnnnnnnnnnnnnnnnnnnnnnnnnnnnnnnnnnnnnnnnnnnnnnnnnnnnnnnnnnnnnnnnnnnnnnnnnnnnnnnnnnnnnnnnnnnnnnnnnnnnnnnnnnnnnnnnnnnnnnnnnnnnnnnnnnnnnnnnnnnnnnnnnnnnnnnnnnnnnnnnnnnnnnnnnnnnnnnnnnnnnnnnnnnnnnnnnnnnnnnnnnnnnnnnnnnnnnnnnnnnnnnnnnnnnnnnnnnnnnnnnnnnnnnnnnnnnnnnnnnnnnnnnnnnnnnnnnnnnnnnnnnnnnnnnnnnnnnnnnnnnnnnnnnnnnnnnnnnnnnnnnnnnnnnnnnnnnnnnnnnnnnnnnnnnnnnnnnnnnnnnnnnnnnnnnnnnnnnnnnnnnnnnnnnnnnnnnnnnnnnnnnnnnnnnnnnnnnnnnnnnnnnnnnnnnnnnnnnnnnnnnnnnnnnnnnnnnnnnnnnnnnnnnnnnnnnnnnnnnnnnnnnnnnnnnnnnnnnnnnnnnnnnnnnnnnnnnnnnnnnnnnnnnnnnnnnnnnnnnnnnnnnnnnnnnnnnnnnnnnnnnnnnnnnnnnnnnnnnnnnnnnnnnnnnnnnnnnnnnnnnnnnnnnnnnnnnnnnnnnnnnnnnnnnnnnnnnnnnnnnnnnnnnnnnnnnnnnnnnnnnnnnnnnnnnnnnnnnnnnnnnnnnnnnnnnnnnnnnnnnnnnnnnnnnnnnnnnnnnnnnnnnnnnnnnnnnnnnnnnnnnnnnnnnnnnnnnnnnnnnnnnnnnnnnnnnnnnnnnnnnnnnnnnnnnnnnnnnnnnnnnnnnnnnnnnnnnnnnnnnnnnnnnnnnnnnnnnnnnnnnnnnnnnnnnnnnnnnnnnnnnnnnnnnnnnnnnnnnnnnnnnnnnnnnnnnnnnnnnnnnnnnnnnnnnnnnnnnnnnnnnnnnnnnnnnnnnnnnnnnnnnnnnnnnnnnnnnnnnnnnnnnnnnnnnnnnnnnnnnnnnnnnnnnnnnnnnnnnnnnnnnnnnnnnnnnnnnnnnnnnnnnnnnnnnnnnnnnnnnnnnnnnnnnnnnnnnnnnnnnnnnnnnnnnnnnnnnnnnnnnnnnnnnnnnnnnnnnnnnnnnnnnnnnnnnnnnnnnnnnnnnnnnnnnnnnnnnnnnnnnnnnnnnnnnnnnnnnnnnnnnnnnnnnnnnnnnnnnnnnnnnnnnnnnnnnnnnnnnnnnnnnnnnnnnnnnnnnnnnnnnnnnnnnnnnnnnnnnnnnnnnnnnnnnnnnnnnnnnnnnnnnnnnnnnnnnnnnnnnnnnnnnnnnnnnnnnnnnnnnnnnnnnnnnnnnnnnnnnnnnnnnnnnnnnnnnnnnnnnnnnnnnnnnnnnnnnnnnnnnnnnnnnnnnnnnnnnnnnnnnnnnnnnnnnnnnnnnnnnnnnnnnnnnnnnnnnnnnnnnnnnnnnnnnnnnnnnnnnnnnnnnnnnnnnnnnnnnnnnnnnnnnnnnnnnnnnnnnnnnnnnnnnnnnnnnnnnnnnnnnnnnnnnnnnnnnnnnnnnnnnnnnnnnnnnnnnnnnnnnnnnnnnnnnnnnnnnnnnnnnnnnnnnnnnnnnnnnnnnnnnnnnnnnnnnnnnnnnnnnnnnnnnnnnnnnnnnnnnnnnnnnnnnnnnnnnnnnnnnnnnnnnnnnnnnnnnnnnnnnnnnnnnnnnnnnnnnnnnnnnnnnnnnnnnnnnnnnnnnnnnnnnnnnnnnnnnnnnnnnnnnnnnnnnnnnnnnnnnnnnnnnnnnnnnnnnnnnnnnnnnnnnnnnnnnnnnnnnnnnnnnnnnnnnnnnnnnnnnnnnnnnnnnnnnnnnnnnnnnnnnnnnnnnnnnnnnnnnnnnnnnnnnnnnnnnnnnnnnnnnnnnnnnnnnnnnnnnnnnnnnnnnnnnnnnnnnnnnnnnnnnnnnnnnnnnnnnnnnnnnnnnnnnnnnnnnnnnnnnnnnnnnnnnnnnnnnnnnnnnnnnnnnnnnnnnnnnnnnnnnnnnnnnnnnnnnnnnnnnnnnnnnnnnnnnnnnnnnnnnnnnnnnnnnnnnnnnnnnnnnnnnnnnnnnnnnnnnnnnnnnnnnnnnnnnnnnnnnnnnnnnnnnnnnnnnnnnnnnnnnnnnnnnnnnnnnnnnnnnnnnnnnnnnnnnnnnnnnnnnnnnnnnnnnnnnnnnnnnnnnnnnnnnnnnnnnnnnnnnnnnnnnnnnnnnnnnnnnnnnnnnnnnnnnnnnnnnnnnnnnnnnnnnnnnnnnnnnnnnnnnnnnnnnnnnnnnnnnnnnnnnnnnnnnnnnnnnnnnnnnnnnnnnnnnnnnnnnnnnnnnnnnnnnnnnnnnnnnnnnnnnnnnnnnnnnnnnnnnnnnnnnnnnnnnnnnnnnnnnnnnnnnnnnnnnnnnnnnnnnnnnnnnnnnnnnnnnnnnnnnnnnnnnnnnnnnnnnnnnnnnnnnnnnnnnnnnnnnnnnnnnnnnnnnnnnnnnnnnnnnnnnnnnnnnnnnnnnnnnnnnnnnnnnnnnnnnnnnnnnnnnnnnnnnnnnnnnnnnnnnnnnnnnnnnnnnnnnnnnnnnnnnnnnnnnnnnnnnnnnnnnnnnnnnnnnnnnnnnnnnnnnnnnnnnnnnnnnnnnnnnnnnnnnnnnnnnnnnnnnnnnnnnnnnnnnnnnnnnnnnnnnnnnnnnnnnnnnnnnnnnnnnnnnnnnnnnnnnnnnnnnnnnnnnnnnnnnnnnnnnnnnnnnnnnnnnnnnnnnnnnnnnnnnnnnnnnnnnnnnnnnnnnnnnnnnnnnnnnnnnnnnnnnnnnnnnnnnnnnnnnnnnnnnnnnnnnnnnnnnnnnnnnnnnnnnnnnnnnnnnnnnnnnnnnnnnnnnnnnnnnnnnnnnnnnnnnnnnnnnnnnnnnnnnnnnnnnnnnnnnnnnnnnnnnnnnnnnnnnnnnnnnnnnnnnnnnnnnnnnnnnnnnnnnnnnnnnnnnnnnnnnnnnnnnnnnnnnnnnnnnnnnnnnnnnnnnnnnnnnnnnnnnnnnnnnnnnnnnnnnnnnnnnnnnnnnnnnnnnnnnnnnnnnnnnnnnnnnnnnnnnnnnnnnnnnnnnnnnnnnnnnnnnnnnnnnnnnnnnnnnnnnnnnnnnnnnnnnnnnnnnnnnnnnnnnnnnnnnnnnnnnnnnnnnnnnnnnnnnnnnnnnnnnnnnnnnnnnnnnnnnnnnnnnnnnnnnnnnnnnnnnnnnnnnnnnnnnnnnnnnnnnnnnnnnnnnnnnnnnnnnnnnnnnnnnnnnnnnnnnnnnnnnnnnnnnnnnnnnnnnnnnnnnnnnnnnnnnnnnnnnnnnnnnnnnnnnnnnnnnnnnnnnnnnnnnnnnnnnnnnnnnnnnnnnnnnnnnnnnnnnnnnnnnnnnnnnnnnnnnnnnnnnnnnnnnnnnnnnnnnnnnnnnnnnnnnnnnnnnnnnnnnnnnnnnnnnnnnnnnnnnnnnnnnnnnnnnnnnnnnnnnnnnnnnnnnnnnnnnnnnnnnnnnnnnnnnnnnnnnnnnnnnnnnnnnnnnnnnnnnnnnnnnnnnnnnnnnnnnnnnnnnnnnnnnnnnnnnnnnnnnnnnnnnnnnnnnnnnnnnnnnnnnnnnnnnnnnnnnnnnnnnnnnnnnnnnnnnnnnnnnnnnnnnnnnnnnnnnnnnnnnnnnnnnnnnnnnnnnnnnnnnnnnnnnnnnnnnnnnnnnnnnnnnnnnnnnnnnnnnnnnnnnnnnnnnnnnnnnnnnnnnnnnnnnnnnnnnnnnnnnnnnnnnnnnnnnnnnnnnnnnnnnnnnnnnnnnnnnnnnnnnnnnnnnnnnnnnnnnnnnnnnnnnnnnnnnnnnnnnnnnnnnnnnnnnnnnnnnnnnnnnnnnnnnnnnnnnnnnnnnnnnnnnnnnnnnnnnnnnnnnnnnnnnnnnnnnnnnnnnnnnnnnnnnnnnnnnnnnnnnnnnnnnnnnnnnnnnnnnnnnnnnnnnnnnnnnnnnnnnnnnnnnnnnnnnnnnnnnnnnnnnnnnnnnnnnnnnnnnnnnnnnnnnnnnnnnnnnnnnnnnnnnnnnnnnnnnnnnnnnnnnnnnnnnnnnnnnnnnnnnnnnnnnnnnnnnnnnnnnnnnnnnnnnnnnnnnnnnnnnnnnnnnnnnnnnnnnnnnnnnnnnnnnnnnnnnnnnnnnnnnnnnnnnnnnnnnnnnnnnnnnnnnnnnnnnnnnnnnnnnnnnnnnnnnnnnnnnnnnnnnnnnnnnnnnnnnnnnnnnnnnnnnnnnnnnnnnnnnnnnnnnnnnnnnnnnnnnnnnnnnnnnnnnnnnnnnnnnnnnnnnnnnnnnnnnnnnnnnnnnnnnnnnnnnnnnnnnnnnnnnnnnnnnnnnnnnnnnnnnnnnnnnnnnnnnnnnnnnnnnnnnnnnnnnnnnnnnnnnnnnnnnnnnnnnnnnnnnnnnnnnnnnnnnnnnnnnnnnnnnnnnnnnnnnnnnnnnnnnnnnnnnnnnnnnnnnnnnnnnnnnnnnnnnnnnnnnnnnnnnnnnnnnnnnnnnnnnnnnnnnnnnnnnnnnnnnnnnnnnnnnnnnnnnnnnnnnnnnnnnnnnnnnnnnnnnnnnnnnnnnnnnnnnnnnnnnnnnnnnnnnnnnnnnnnnnnnnnnnnnnnnnnnnnnnnnnnnnnnnnnnnnnnnnnnnnnnnnnnnnnnnnnnnnnnnnnnnnnnnnnnnnnnnnnnnnnnnnnnnnnnnnnnnnnnnnnnnnnnnnnnnnnnnnnnnnnnnnnnnnnnnnnnnnnnnnnnnnnnnnnnnnnnnnnnnnnnnnnnnnnnnnnnnnnnnnnnnnnnnnnnnnnnnnnnnnnnnnnnnnnnnnnnnnnnnnnnnnnnnnnnnnnnnnnnnnnnnnnnnnnnnnnnnnnnnnnnnnnnnnnnnnnnnnnnnnnnnnnnnnnnnnnnnnnnnnnnnnnnnnnnnnnnnnnnnnnnnnnnnnnnnnnnnnnnnnnnnnnnnnnnnnnnnnnnnnnnnnnnnnnnnnnnnnnnnnnnnnnnnnnnnnnnnnnnnnnnnnnnnnnnnnnnnnnnnnnnnnnnnnnnnnnnnnnnnnnnnnnnnnnnnnnnnnnnnnnnnnnnnnnnnnnnnnnnnnnnnnnnnnnnnnnnnnnnnnnnnnnnnnnnnnnnnnnnnnnnnnnnnnnnnnnnnnnnnnnnnnnnnnnnnnnnnnnnnnnnnnnnnnnnnnnnnnnnnnnnnnnnnnnnnnnnnnnnnnnnnnnnnnnnnnnnnnnnnnnnnnnnnnnnnnnnnnnnnnnnnnnnnnnnnnnnnnnnnnnnnnnnnnnnnnnnnnnnnnnnnnnnnnnnnnnnnnnnnnnnnnnnnnnnnnnnnnnnnnnnnnnnnnnnnnnnnnnnnnnnnnnnnnnnnnnnnnnnnnnnnnnnnnnnnnnnnnnnnnnnnnnnnnnnnnnnnnnnnnnnnnnnnnnnnnnnnnnnnnnnnnnnnnnnnnnnnnnnnnnnnnnnnnnnnnnnnnnnnnnnnnnnnnnnnnnnnnnnnnnnnnnnnnnnnnnnnnnnnnnnnnnnnnnnnnnnnnnnnnnnnnnnnnnnnnnnnnnnnnnnnnnnnnnnnnnnnnnnnnnnnnnnnnnnnnnnnnnnnnnnnnnnnnnnnnnnnnnnnnnnnnnnnnnnnnnnnnnnnnnnnnnnnnnnnnnnnnnnnnnnnnnnnnnnnnnnnnnnnnnnnnnnnnnnnnnnnnnnnnnnnnnnnnnnnnnnnnnnnnnnnnnnnnnnnnnnnnnnnnnnnnnnnnnnnnnnnnnnnnnnnnnnnnnnnnnnnnnnnnnnnnnnnnnnnnnnnnnnnnnnnnnnnnnnnnnnnnnnnnnnnnnnnnnnnnnnnnnnnnnnnnnnnnnnnnnnnnnnnnnnnnnnnnnnnnnnnnnnnnnnnnnnnnnnnnnnnnnnnnnnnnnnnnnnnnnnnnnnnnnnnnnnnnnnnnnnnnnnnnnnnnnnnnnnnnnnnnnnnnnnnnnnnnnnnnnnnnnnnnnnnnnnnnnnnnnnnnnnnnnnnnnnnnnnnnnnnnnnnnnnnnnnnnnnnnnnnnnnnnnnnnnnnnnnnnnnnnnnnnnnnnnnnnnnnnnnnnnnnnnnnnnnnnnnnnnnnnnnnnnnnnnnnnnnnnnnnnnnnnnnnnnnnnnnnnnnnnnnnnnnnnnnnnnnnnnnnnnnnnnnnnnnnnnnnnnnnnnnnnnnnnnnnnnnnnnnnnnnnnnnnnnnnnnnnnnnnnnnnnnnnnnnnnnnnnnnnnnnnnnnnnnnnnnnnnnnnnnnnnnnnnnnnnnnnnnnnnnnnnnnnnnnnnnnnnnnnnnnnnnnnnnnnnnnnnnnnnnnnnnnnnnnnnnnnnnnnnnnnnnnnnnnnnnnnnnnnnnnnnnnnnnnnnnnnnnnnnnnnnnnnnnnnnnnnnnnnnnnnnnnnnnnnnnnnnnnnnnnnnnnnnnnnnnnnnnnnnnnnnnnnnnnnnnnnnnnnnnnnnnnnnnnnnnnnnnnnnnnnnnnnnnnnnnnnnnnnnnnnnnnnnnnnnnnnnnnnnnnnnnnnnnnnnnnnnnnnnnnnnnnnnnnnnnnnnnnnnnnnnnnnnnnnnnnnnnnnnnnnnnnnnnnnnnnnnnnnnnnnnnnnnnnnnnnnnnnnnnnnnnnnnnnnnnnnnnnnnnnnnnnnnnnnnnnnnnnnnnnnnnnnnnnnnnnnnnnnnnnnnnnnnnnnnnnnnnnnnnnnnnnnnnnnnnnnnnnnnnnnnnnnnnnnnnnnnnnnnnnnnnnnnnnnnnnnnnnnnnnnnnnnnnnnnnnnnnnnnnnnnnnnnnnnnnnnnnnnnnnnnnnnnnnnnnnnnnnnnnnnnnnnnnnnnnnnnnnnnnnnnnnnnnnnnnnnnnnnnnnnnnnnnnnnnnnnnnnnnnnnnnnnnnnnnnnnnnnnnnnnnnnnnnnnnnnnnnnnnnnnnnnnnnnnnnnnnnnnnnnnnnnnnnnnnnnnnnnnnnnnnnnnnnnnnnnnnnnnnnnnnnnnnnnnnnnnnnnnnnnnnnnnnnnnnnnnnnnnnnnnnnnnnnnnnnnnnnnnnnnnnnnnnnnnnnnnnnnnnnnnnnnnnnnnnnnnnnnnnnnnnnnnnnnnnnnnnnnnnnnnnnnnnnnnnnnnnnnnnnnnnnnnnnnnnnnnnnnnnnnnnnnnnnnnnnnnnnnnnnnnnnnnnnnnnnnnnnnnnnnnnnnnnnnnnnnnnnnnnnnnnnnnnnnnnnnnnnnnnnnnnnnnnnnnnnnnnnnnnnnnnnnnnnnnnnnnnnnnnnnnnnnnnnnnnnnnnnnnnnnnnnnnnnnnnnnnnnnnnnnnnnnnnnnnnnnnnnnnnnnnnnnnnnnnnnnnnnnnnnnnnnnnnnnnnnnnnnnnnnnnnnnnnnnnnnnnnnnnnnnnnnnnnnnnnnnnnnnnnnnnnnnnnnnnnnnnnnnnnnnnnnnnnnnnnnnnnnnnnnnnnnnnnnnnnnnnnnnnnnnnnnnnnnnnnnnnnnnnnnnnnnnnnnnnnnnnnnnnnnnnnnnnnnnnnnnnnnnnnnnnnnnnnnnnnnnnnnnnnnnnnnnnnnnnnnnnnnnnnnnnnnnnnnnnnnnnnnnnnnnnnnnnnnnnnnnnnnnnnnnnnnnnnnnnnnnnnnnnnnnnnnnnnnnnnnnnnnnnnnnnnnnnnnnnnnnnnnnnnnnnnnnnnnnnnnnnnnnnnnnnnnnnnnnnnnnnnnnnnnnnnnnnnnnnnnnnnnnnnnnnnnnnnnnnnnnnnnnnnnnnnnnnnnnnnnnnnnnnnnnnnnnnnnnnnnnnnnnnnnnnnnnnnnnnnnnnnnnnnnnnnnnnnnnnnnnnnnnnnnnnnnnnnnnnnnnnnnnnnnnnnnnnnnnnnnnnnnnnnnnnnnnnnnnnnnnnnnnnnnnnnnnnnnnnnnnnnnnnnnnnnnnnnnnnnnnnnnnnnnnnnnnnnnnnnnnnnnnnnnnnnnnnnnnnnnnnnnnnnnnnnnnnnnnnnnnnnnnnnnnnnnnnnnnnnnnnnnnnnnnnnnnnnnnnnnnnnnnnnnnnnnnnnnnnnnnnnnnnnnnnnnnnnnnnnnnnnnnnnnnnnnnnnnnnnnnnnnnnnnnnnnnnnnnnnnnnnnnnnnnnnnnnnnnnnnnnnnnnnnnnnnnnnnnnnnnnnnnnnnnnnnnnnnnnnnnnnnnnnnnnnnnnnnnnnnnnnnnnnnnnnnnnnnnnnnnnnnnnnnnnnnnnnnnnnnnnnnnnnnnnnnnnnnnnnnnnnnnnnnnnnnnnnnnnnnnnnnnnnnnnnnnnnnnnnnnnnnnnnnnnnnnnnnnnnnnnnnnnnnnnnnnnnnnnnnnnnnnnnnnnnnnnnnnnnnnnnnnnnnnnnnnnnnnnnnnnnnnnnnnnnnnnnnnnnnnnnnnnnnnnnnnnnnnnnnnnnnnnnnnnnnnnnnnnnnnnnnnnnnnnnnnnnnnnnnnnnnnnnnnnnnnnnnnnnnnnnnnnnnnnnnnnnnnnnnnnnnnnnnnnnnnnnnnnnnnnnnnnnnnnnnnnnnnnnnnnnnnnnnnnnnnnnnnnnnnnnnnnnnnnnnnnnnnnnnnnnnnnnnnnnnnnnnnnnnnnnnnnnnnnnnnnnnnnnnnnnnnnnnnnnnnnnnnnnnnnnnnnnnnnnnnnnnnnnnnnnnnnnnnnnnnnnnnnnnnnnnnnnnnnnnnnnnnnnnnnnnnnnnnnnnnnnnnnnnnnnnnnnnnnnnnnnnnnnnnnnnnnnnnnnnnnnnnnnnnnnnnnnnnnnnnnnnnnnnnnnnnnnnnnnnnnnnnnnnnnnnnnnnnnnnnnnnnnnnnnnnnnnnnnnnnnnnnnnnnnnnnnnnnnnnnnnnnnnnnnnnnnnnnnnnnnnnnnnnnnnnnnnnnnnnnnnnnnnnnnnnnnnnnnnnnnnnnnnnnnnnnnnnnnnnnnnnnnnnnnnnnnnnnnnnnnnnnnnnnnnnnnnnnnnnnnnnnnnnnnnnnnnnnnnnnnnnnnnnnnnnnnnnnnnnnnnnnnnnnnnnnnnnnnnnnnnnnnnnnnnnnnnnnnnnnnnnnnnnnnnnnnnnnnnnnnnnnnnnnnnnnnnnnnnnnnnnnnnnnnnnnnnnnnnnnnnnnnnnnnnnnnnnnnnnnnnnnnnnnnnnnnnnnnnnnnnnnnnnnnnnnnnnnnnnnnnnnnnnnnnnnnnnnnnnnnnnnnnnnnnnnnnnnnnnnnnnnnnnnnnnnnnnnnnnnnnnnnnnnnnnnnnnnnnnnnnnnnnnnnnnnnnnnnnnnnnnnnnnnnnnnnnnnnnnnnnnnnnnnnnnnnnnnnnnnnnnnnnnnnnnnnnnnnnnnnnnnnnnnnnnnnnnnnnnnnnnnnnnnnnnnnnnnnnnnnnnnnnnnnnnnnnnnnnnnnnnnnnnnnnnnnnnnnnnnnnnnnnnnnnnnnnnnnnnnnnnnnnnnnnnnnnnnnnnnnnnnnnnnnnnnnnnnnnnnnnnnnnnnnnnnnnnnnnnnnnnnnnnnnnnnnnnnnnnnnnnnnnnnnnnnnnnnnnnnnnnnnnnnnnnnnnnnnnnnnnnnnnnnnnnnnnnnnnnnnnnnnnnnnnnnnnnnnnnnnnnnnnnnnnnnnnnnnnnnnnnnnnnnnnnnnnnnnnnnnnnnnnnnnnnnnnnnnnnnnnnnnnnnnnnnnnnnnnnnnnnnnnnnnnnnnnnnnnnnnnnnnnnnnnnnnnnnnnnnnnnnnnnnnnnnnnnnnnnnnnnnnnnnnnnnnnnnnnnnnnnnnnnnnnnnnnnnnnnnnnnnnnnnnnnnnnnnnnnnnnnnnnnnnnnnnnnnnnnnnnnnnnnnnnnnnnnnnnnnnnnnnnnnnnnnnnnnnnnnnnnnnnnnnnnnnnnnnnnnnnnnnnnnnnnnnnnnnnnnnnnnnnnnnnnnnnnnnnnnnnnnnnnnnnnnnnnnnnnnnnnnnnnnnnnnnnnnnnnnnnnnnnnnnnnnnnnnnnnnnnnnnnnnnnnnnnnnnnnnnnnnnnnnnnnnnnnnnnnnnnnnnnnnnnnnnnnnnnnnnnnnnnnnnnnnnnnnnnnnnnnnnnnnnnnnnnnnnnnnnnnnnnnnnnnnnnnnnnnnnnnnnnnnnnnnnnnnnnnnnnnnnnnnnnnnnnnnnnnnnnnnnnnnnnnnnnnnnnnnnnnnnnnnnnnnnnnnnnnnnnnnnnnnnnnnnnnnnnnnnnnnnnnnnnnnnnnnnnnnnnnnnnnnnnnnnnnnnnnnnnnnnnnnnnnnnnnnnnnnnnnnnnnnnnnnnnnnnnnnnnnnnnnnnnnnnnnnnnnnnnnnnnnnnnnnnnnnnnnnnnnnnnnnnnnnnnnnnnnnnnnnnnnnnnnnnnnnnnnnnnnnnnnnnnnnnnnnnnnnnnnnnnnnnnnnnnnnnnnnnnnnnnnnnnnnnnnnnnnnnnnnnnnnnnnnnnnnnnnnnnnnnnnnnnnnnnnnnnnnnnnnnnnnnnnnnnnnnnnnnnnnnnnnnnnnnnnnnnnnnnnnnnnnnnnnnnnnnnnnnnnnnnnnnnnnnnnnnnnnnnnnnnnnnnnnnnnnnnnnnnnnnnnnnnnnnnnnnnnnnnnnnnnnnnnnnnnnnnnnnnnnnnnnnnnnnnnnnnnnnnnnnnnnnnnnnnnnnnnnnnnnnnnnnnnnnnnnnnnnnnnnnnnnnnnnnnnnnnnnnnnnnnnnnnnnnnnnnnnnnnnnnnnnnnnnnnnnnnnnnnnnnnnnnnnnnnnnnnnnnnnnnnnnnnnnnnnnnnnnnnnnnnnnnnnnnnnnnnnnnnnnnnnnnnnnnnnnnnnnnnnnnnnnnnnnnnnnnnnnnnnnnnnnnnnnnnnnnnnnnnnnnnnnnnnnnnnnnnnnnnnnnnnnnnnnnnnnnnnnnnnnnnnnnnnnnnnnnnnnnnnnnnnnnnnnnnnnnnnnnnnnnnnnnnnnnnnnnnnnnnnnnnnnnnnnnnnnnnnnnnnnnnnnnnnnnnnnnnnnnnnnnnnnnnnnnnnnnnnnnnnnnnnnnnnnnnnnnnnnnnnnnnnnnnnnnnnnnnnnnnnnnnnnnnnnnnnnnnnnnnnnnnnnnnnnnnnnnnnnnnnnnnnnnnnnnnnnnnnnnnnnnnnnnnnnnnnnnnnnnnnnnnnnnnnnnnnnnnnnnnnnnnnnnnnnnnnnnnnnnnnnnnnnnnnnnnnnnnnnnnnnnnnnnnnnnnnnnnnnnnnnnnnnnnnnnnnnnnnnnnnnnnnnnnnnnnnnnnnnnnnnnnnnnnnnnnnnnnnnnnnnnnnnnnnnnnnnnnnnnnnnnnnnnnnnnnnnnnnnnnnnnnnnnnnnnnnnnnnnnnnnnnnnnnnnnnnnnnnnnnnnnnnnnnnnnnnnnnnnnnnnnnnnnnnnnnnnnnnnnnnnnnnnnnnnnnnnnnnnnnnnnnnnnnnnnnnnnnnnnnnnnnnnnnnnnnnnnnnnnnnnnnnnnnnnnnnnnnnnnnnnnnnnnnnnnnnnnnnnnnnnnnnnnnnnnnnnnnnnnnnnnnnnnnnnnnnnnnnnnnnnnnnnnnnnnnnnnnnnnnnnnnnnnnnnnnnnnnnnnnnnnnnnnnnnnnnnnnnnnnnnnnnnnnnnnnnnnnnnnnnnnnnnnnnnnnnnnnnnnnnnnnnnnnnnnnnnnnnnnnnnnnnnnnnnnnnnnnnnnnnnnnnnnnnnnnnnnnnnnnnnnnnnnnnnnnnnnnnnnnnnnnnnnnnnnnnnnnnnnnnnnnnnnnnnnnnnnnnnnnnnnnnnnnnnnnnnnnnnnnnnnnnnnnnnnnnnnnnnnnnnnnnnnnnnnnnnnnnnnnnnnnnnnnnnnnnnnnnnnnnnnnnnnnnnnnnnnnnnnnnnnnnnnnnnnnnnnnnnnnnnnnnnnnnnnnnnnnnnnnnnnnnnnnnnnnnnnnnnnnnnnnnnnnnnnnnnnnnnnnnnnnnnnnnnnnnnnnnnnnnnnnnnnnnnnnnnnnnnnnnnnnnnnnnnnnnnnnnnnnnnnnnnnnnnnnnnnnnnnnnnnnnnnnnnnnnnnnnnnnnnnnnnnnnnnnnnnnnnnnnnnnnnnnnnnnnnnnnnnnnnnnnnnnnnnnnnnnnnnnnnnnnnnnnnnnnnnnnnnnnnnnnnnnnnnnnnnnnnnnnnnnnnnnnnnnnnnnnnnnnnnnnnnnnnnnnnnnnnnnnnnnnnnnnnnnnnnnnnnnnnnnnnnnnnnnnnnnnnnnnnnnnnnnnnnnnnnnnnnnnnnnnnnnnnnnnnnnnnnnnnnnnnnnnnnnnnnnnnnnnnnnnnnnnnnnnnnnnnnnnnnnnnnnnnnnnnnnnnnnnnnnnnnnnnnnnnnnnnnnnnnnnnnnnnnnnnnnnnnnnnnnnnnnnnnnnnnnnnnnnnnnnnnnnnnnnnnnnnnnnnnnnnnnnnnnnnnnnnnnnnnnnnnnnnnnnnnnnnnnnnnnnnnnnnnnnnnnnnnnnnnnnnnnnnnnnnnnnnnnnnnnnnnnnnnnnnnnnnnnnnnnnnnnnnnnnnnnnnnnnnnnnnnnnnnnnnnnnnnnnnnnnnnnnnnnnnnnnnnnnnnnnnnnnnnnnnnnnnnnnnnnnnnnnnnnnnnnnnnnnnnnnnnnnnnnnnnnnnnnnnnnnnnnnnnnnnnnnnnnnnnnnnnnnnnnnnnnnnnnnnnnnnnnnnnnnnnnnnnnnnnnnnnnnnnnnnnnnnnnnnnnnnnnnnnnnnnnnnnnnnnnnnnnnnnnnnnnnnnnnnnnnnnnnnnnnnnnnnnnnnnnnnnnnnnnnnnnnnnnnnnnnnnnnnnnnnnnnnnnnnnnnnnnnnnnnnnnnnnnnnnnnnnnnnnnnnnnnnnnnnnnnnnnnnnnnnnnnnnnnnnnnnnnnnnnnnnnnnnnnnnnnnnnnnnnnnnnnnnnnnnnnnnnnnnnnnnnnnnnnnnnnnnnnnnnnnnnnnnnnnnnnnnnnnnnnnnnnnnnnnnnnnnnnnnnnnnnnnnnnnnnnnnnnnnnnnnnnnnnnnnnnnnnnnnnnnnnnnnnnnnnnnnnnnnnnnnnnnnnnnnnnnnnnnnnnnnnnnnnnnnnnnnnnnnnnnnnnnnnnnnnnnnnnnnnnnnnnnnnnnnnnnnnnnnnnnnnnnnnnnnnnnnnnnnnnnnnnnnnnnnnnnnnnnnnnnnnnnnnnnnnnnnnnnnnnnnnnnnnnnnnnnnnnnnnnnnnnnnnnnnnnnnnnnnnnnnnnnnnnnnnnnnnnnnnnnnnnnnnnnnnnnnnnnnnnnnnnnnnnnnnnnnnnnnnnnnnnnnnnnnnnnnnnnnnnnnnnnnnnnnnnnnnnnnnnnnnnnnnnnnnnnnnnnnnnnnnnnnnnnnnnnnnnnnnnnnnnnnnnnnnnnnnnnnnnnnnnnnnnnnnnnnnnnnnnnnnnnnnnnnnnnnnnnnnnnnnnnnnnnnnnnnnnnnnnnnnnnnnnnnnnnnnnnnnnnnnnnnnnnnnnnnnnnnnnnnnnnnnnnnnnnnnnnnnnnnnnnnnnnnnnnnnnnnnnnnnnnnnnnnnnnnnnnnnnnnnnnnnnnnnnnnnnnnnnnnnnnnnnnnnnnnnnnnnnnnnnnnnnnnnnnnnnnnnnnnnnnnnnnnnnnnnnnnnnnnnnnnnnnnnnnnnnnnnnnnnnnnnnnnnnnnnnnnnnnnnnnnnnnnnnnnnnnnnnnnnnnnnnnnnnnnnnnnnnnnnnnnnnnnnnnnnnnnnnnnnnnnnnnnnnnnnnnnnnnnnnnnnnnnnnnnnnnnnnnnnnnnnnnnnnnnnnnnnnnnnnnnnnnnnnnnnnnnnnnnnnnnnnnnnnnnnnnnnnnnnnnnnnnnnnnnnnnnnnnnnnnnnnnnnnnnnnnnnnnnnnnnnnnnnnnnnnnnnnnnnnnnnnnnnnnnnnnnnnnnnnnnnnnnnnnnnnnnnnnnnnnnnnnnnnnnnnnnnnnnnnnnnnnnnnnnnnnnnnnnnnnnnnnnnnnnnnnnnnnnnnnnnnnnnnnnnnnnnnnnnnnnnnnnnnnnnnnnnnnnnnnnnnnnnnnnnnnnnnnnnnnnnnnnnnnnnnnnnnnnnnnnnnnnnnnnnnnnnnnnnnnnnnnnnnnnnnnnnnnnnnnnnnnnnnnnnnnnnnnnnnnnnnnnnnnnnnnnnnnnnnnnnnnnnnnnnnnnnnnnnnnnnnnnnnnnnnnnnnnnnnnnnnnnnnnnnnnnnnnnnnnnnnnnnnnnnnnnnnnnnnnnnnnnnnnnnnnnnnnnnnnnnnnnnnnnnnnnnnnnnnnnnnnnnnnnnnnnnnnnnnnnnnnnnnnnnnnnnnnnnnnnnnnnnnnnnnnnnnnnnnnnnnnnnnnnnnnnnnnnnnnnnnnnnnnnnnnnnnnnnnnnnnnnnnnnnnnnnnnnnnnnnnnnnnnnnnnnnnnnnnnnnnnnnnnnnnnnnnnnnnnnnnnnnnnnnnnnnnnnnnnnnnnnnnnnnnnnnnnnnnnnnnnnnnnnnnnnnnnnnnnnnnnnnnnnnnnnnnnnnnnnnnnnnnnnnnnnnnnnnnnnnnnnnnnnnnnnnnnnnnnnnnnnnnnnnnnnnnnnnnnnnnnnnnnnnnnnnnnnnnnnnnnnnnnnnnnnnnnnnnnnnnnnnnnnnnnnnnnnnnnnnnnnnnnnnnnnnnnnnnnnnnnnnnnnnnnnnnnnnnnnnnnnnnnnnnnnnnnnnnnnnnnnnnnnnnnnnnnnnnnnnnnnnnnnnnnnnnnnnnnnnnnnnnnnnnnnnnnnnnnnnnnnnnnnnnnnnnnnnnnnnnnnnnnnnnnnnnnnnnnnnnnnnnnnnnnnnnnnnnnnnnnnnnnnnnnnnnnnnnnnnnnnnnnnnnnnnnnnnnnnnnnnnnnnnnnnnnnnnnnnnnnnnnnnnnnnnnnnnnnnnnnnnnnnnnnnnnnnnnnnnnnnnnnnnnnnnnnnnnnnnnnnnnnnnnnnnnnnnnnnnnnnnnnnnnnnnnnnnnnnnnnnnnnnnnnnnnnnnnnnnnnnnnnnnnnnnnnnnnnnnnnnnnnnnnnnnnnnnnnnnnnnnnnnnnnnnnnnnnnnnnnnnnnnnnnnnnnnnnnnnnnnnnnnnnnnnnnnnnnnnnnnnnnnnnnnnnnnnnnnnnnnnnnnnnnnnnnnnnnnnnnnnnnnnnnnnnnnnnnnnnnnnnnnnnnnnnnnnnnnnnnnnnnnnnnnnnnnnnnnnnnnnnnnnnnnnnnnnnnnnnnnnnnnnnnnnnnnnnnnnnnnnnnnnnnnnnnnnnnnnnnnnnnnnnnnnnnnnnnnnnnnnnnnnnnnnnnnnnnnnnnnnnnnnnnnnnnnnnnnnnnnnnnnnnnnnnnnnnnnnnnnnnnnnnnnnnnnnnnnnnnnnnnnnnnnnnnnnnnnnnnnnnnnnnnnnnnnnnnnnnnnnnnnnnnnnnnnnnnnnnnnnnnnnnnnnnnnnnnnnnnnnnnnnnnnnnnnnnnnnnnnnnnnnnnnnnnnnnnnnnnnnnnnnnnnnnnnnnnnnnnnnnnnnnnnnnnnnnnnnnnnnnnnnnnnnnnnnnnnnnnnnnnnnnnnnnnnnnnnnnnnnnnnnnnnnnnnnnnnnnnnnnnnnnnnnnnnnnnnnnnnnnnnnnnnnnnnnnnnnnnnnnnnnnnnnnnnnnnnnnnnnnnnnnnnnnnnnnnnnnnnnnnnnnnnnnnnnnnnnnnnnnnnnnnnnnnnnnnnnnnnnnnnnnnnnnnnnnnnnnnnnnnnnnnnnnnnnnnnnnnnnnnnnnnnnnnnnnnnnnnnnnnnnnnnnnnnnnnnnnnnnnnnnnnnnnnnnnnnnnnnnnnnnnnnnnnnnnnnnnnnnnnnnnnnnnnnnnnnnnnnnnnnnnnnnnnnnnnnnnnnnnnnnnnnnnnnnnnnnnnnnnnnnnnnnnnnnnnnnnnnnnnnnnnnnnnnnnnnnnnnnnnnnnnnnnnnnnnnnnnnnnnnnnnnnnnnnnnnnnnnnnnnnnnnnnnnnnnnnnnnnnnnnnnnnnnnnnnnnnnnnnnnnnnnnnnnnnnnnnnnnnnnnnnnnnnnnnnnnnnnnnnnnnnnnnnnnnnnnnnnnnnnnnnnnnnnnnnnnnnnnnnnnnnnnnnnnnnnnnnnnnnnnnnnnnnnnnnnnnnnnnnnnnnnnnnnnnnnnnnnnnnnnnnnnnnnnnnnnnnnnnnnnnnnnnnnnnnnnnnnnnnnnnnnnnnnnnnnnnnnnnnnnnnnnnnnnnnnnnnnnnnnnnnnnnnnnnnnnnnnnnnnnnnnnnnnnnnnnnnnnnnnnnnnnnnnnnnnnnnnnnnnnnnnnnnnnnnnnnnnnnnnnnnnnnnnnnnnnnnnnnnnnnnnnnnnnnnnnnnnnnnnnnnnnnnnnnnnnnnnnnnnnnnnnnnnnnnnnnnnnnnnnnnnnnnnnnnnnnnnnnnnnnnnnnnnnnnnnnnnnnnnnnnnnnnnnnnnnnnnnnnnnnnnnnnnnnnnnnnnnnnnnnnnnnnnnnnnnnnnnnnnnnnnnnnnnnnnnnnnnnnnnnnnnnnnnnnnnnnnnnnnnnnnnnnnnnnnnnnnnnnnnnnnnnnnnnnnnnnnnnnnnnnnnnnnnnnnnnnnnnnnnnnnnnnnnnnnnnnnnnnnnnnnnnnnnnnnnnnnnnnnnnnnnnnnnnnnnnnnnnnnnnnnnnnnnnnnnnnnnnnnnnnnnnnnnnnnnnnnnnnnnnnnnnnnnnnnnnnnnnnnnnnnnnnnnnnnnnnnnnnnnnnnnnnnnnnnnnnnnnnnnnnnnnnnnnnnnnnnnnnnnnnnnnnnnnnnnnnnnnnnnnnnnnnnnnnnnnnnnnnnnnnnnnnnnnnnnnnnnnnnnnnnnnnnnnnnnnnnnnnnnnnnnnnnnnnnnnnnnnnnnnnnnnnnnnnnnnnnnnnnnnnnnnnnnnnnnnnnnnnnnnnnnnnnnnnnnnnnnnnnnnnnnnnnnnnnnnnnnnnnnnnnnnnnnnnnnnnnnnnnnnnnnnnnnnnnnnnnnnnnnnnnnnnnnnnnnnnnnnnnnnnnnnnnnnnnnnnnnnnnnnnnnnnnnnnnnnnnnnnnnnnnnnnnnnnnnnnnnnnnnnnnnnnnnnnnnnnnnnnnnnnnnnnnnnnnnnnnnnnnnnnnnnnnnnnnnnnnnnnnnnnnnnnnnnnnnnnnnnnnnnnnnnnnnnnnnnnnnnnnnnnnnnnnnnnnnnnnnnnnnnnnnnnnnnnnnnnnnnnnnnnnnnnnnnnnnnnnnnnnnnnnnnnnnnnnnnnnnnnnnnnnnnnnnnnnnnnnnnnnnnnnnnnnnnnnnnnnnnnnnnnnnnnnnnnnnnnnnnnnnnnnnnnnnnnnnnnnnnnnnnnnnnnnnnnnnnnnnnnnnnnnnnnnnnnnnnnnnnnnnnnnnnnnnnnnnnnnnnnnnnnnnnnnnnnnnnnnnnnnnnnnnnnnnnnnnnnnnnnnnnnnnnnnnnnnnnnnnnnnnnnnnnnnnnnnnnnnnnnnnnnnnnnnnnnnnnnnnnnnnnnnnnnnnnnnnnnnnnnnnnnnnnnnnnnnnnnnnnnnnnnnnnnnnnnnnnnnnnnnnnnnnnnnnnnnnnnnnnnnnnnnnnnnnnnnnnnnnnnnnnnnnnnnnnnnnnnnnnnnnnnnnnnnnnnnnnnnnnnnnnnnnnnnnnnnnnnnnnnnnnnnnnnnnnnnnnnnnnnnnnnnnnnnnnnnnnnnnnnnnnnnnnnnnnnnnnnnnnnnnnnnnnnnnnnnnnnnnnnnnnnnnnnnnnnnnnnnnnnnnnnnnnnnnnnnnnnnnnnnnnnnnnnnnnnnnnnnnnnnnnnnnnnnnnnnnnnnnnnnnnnnnnnnnnnnnnnnnnnnnnnnnnnnnnnnnnnnnnnnnnnnnnnnnnnnnnnnnnnnnnnnnnnnnnnnnnnnnnnnnnnnnnnnnnnnnnnnnnnnnnnnnnnnnnnnnnnnnnnnnnnnnnnnnnnnnnnnnnnnnnnnnnnnnnnnnnnnnnnnnnnnnnnnnnnnnnnnnnnnnnnnnnnnnnnnnnnnnnnnnnnnnnnnnnnnnnnnnnnnnnnnnnnnnnnnnnnnnnnnnnnnnnnnnnnnnnnnnnnnnnnnnnnnnnnnnnnnnnnnnnnnnnnnnnnnnnnnnnnnnnnnnnnnnnnnnnnnnnnnnnnnnnnnnnnnnnnnnnnnnnnnnnnnnnnnnnnnnnnnnnnnnnnnnnnnnnnnnnnnnnnnnnnnnnnnnnnnnnnnnnnnnnnnnnnnnnnnnnnnnnnnnnnnnnnnnnnnnnnnnnnnnnnnnnnnnnnnnnnnnnnnnnnnnnnnnnnnnnnnnnnnnnnnnnnnnnnnnnnnnnnnnnnnnnnnnnnnnnnnnnnnnnnnnnnnnnnnnnnnnnnnnnnnnnnnnnnnnnnnnnnnnnnnnnnnnnnnnnnnnnnnnnnnnnnnnnnnnnnnnnnnnnnnnnnnnnnnnnnnnnnnnnnnnnnnnnnnnnnnnnnnnnnnnnnnnnnnnnnnnnnnnnnnnnnnnnnnnnnnnnnnnnnnnnnnnnnnnnnnnnnnnnnnnnnnnnnnnnnnnnnnnnnnnnnnnnnnnnnnnnnnnnnnnnnnnnnnnnnnnnnnnnnnnnnnnnnnnnnnnnnnnnnnnnnnnnnnnnnnnnnnnnnnnnnnnnnnnnnnnnnnnnnnnnnnnnnnnnnnnnnnnnnnnnnnnnnnnnnnnnnnnnnnnnnnnnnnnnnnnnnnnnnnnnnnnnnnnnnnnnnnnnnnnnnnnnnnnnnnnnnnnnnnnnnnnnnnnnnnnnnnnnnnnnnnnnnnnnnnnnnnnnnnnnnnnnnnnnnnnnnnnnnnnnnnnnnnnnnnnnnnnnnnnnnnnnnnnnnnnnnnnnnnnnnnnnnnnnnnnnnnnnnnnnnnnnnnnnnnnnnnnnnnnnnnnnnnnnnnnnnnnnnnnnnnnnnnnnnnnnnnnnnnnnnnnnnnnnnnnnnnnnnnnnnnnnnnnnnnnnnnnnnnnnnnnnnnnnnnnnnnnnnnnnnnnnnnnnnnnnnnnnnnnnnnnnnnnnnnnnnnnnnnnnnnnnnnnnnnnnnnnnnnnnnnnnnnnnnnnnnnnnnnnnnnnnnnnnnnnnnnnnnnnnnnnnnnnnnnnnnnnnnnnnnnnnnnnnnnnnnnnnnnnnnnnnnnnnnnnnnnnnnnnnnnnnnnnnnnnnnnnnnnnnnnnnnnnnnnnnnnnnnnnnnnnnnnnnnnnnnnnnnnnnnnnnnnnnnnnnnnnnnnnnnnnnnnnnnnnnnnnnnnnnnnnnnnnnnnnnnnnnnnnnnnnnnnnnnnnnnnnnnnnnnnnnnnnnnnnnnnnnnnnnnnnnnnnnnnnnnnnnnnnnnnnnnnnnnnnnnnnnnnnnnnnnnnnnnnnnnnnnnnnnnnnnnnnnnnnnnnnnnnnnnnnnnnnnnnnnnnnnnnnnnnnnnnnnnnnnnnnnnnnnnnnnnnnnnnnnnnnnnnnnnnnnnnnnnnnnnnnnnnnnnnnnnnnnnnnnnnnnnnnnnnnnnnnnnnnnnnnnnnnnnnnnnnnnnnnnnnnnnnnnnnnnnnnnnnnnnnnnnnnnnnnnnnnnnnnnnnnnnnnnnnnnnnnnnnnnnnnnnnnnnnnnnnnnnnnnnnnnnnnnnnnnnnnnnnnnnnnnnnnnnnnnnnnnnnnnnnnnnnnnnnnnnnnnnnnnnnnnnnnnnnnnnnnnnnnnnnnnnnnnnnnnnnnnnnnnnnnnnnnnnnnnnnnnnnnnnnnnnnnnnnnnnnnnnnnnnnnnnnnnnnnnnnnnnnnnnnnnnnnnnnnnnnnnnnnnnnnnnnnnnnnnnnnnnnnnnnnnnnnnnnnnnnnnnnnnnnnnnnnnnnnnnnnnnnnnnnnnnnnnnnnnnnnnnnnnnnnnnnnnnnnnnnnnnnnnnnnnnnnnnnnnnnnnnnnnnnnnnnnnnnnnnnnnnnnnnnnnnnnnnnnnnnnnnnnnnnnnnnnnnnnnnnnnnnnnnnnnnnnnnnnnnnnnnnnnnnnnnnnnnnnnnnnnnnnnnnnnnnnnnnnnnnnnnnnnnnnnnnnnnnnnnnnnnnnnnnnnnnnnnnnnnnnnnnnnnnnnnnnnnnnnnnnnnnnnnnnnnnnnnnnnnnnnnnnnnnnnnnnnnnnnnnnnnnnnnnnnnnnnnnnnnnnnnnnnnnnnnnnnnnnnnnnnnnnnnnnnnnnnnnnnnnnnnnnnnnnnnnnnnnnnnnnnnnnnnnnnnnnnnnnnnnnnnnnnnnnnnnnnnnnnnnnnnnnnnnnnnnnnnnnnnnnnnnnnnnnnnnnnnnnnnnnnnnnnnnnnnnnnnnnnnnnnnnnnnnnnnnnnnnnnnnnnnnnnnnnnnnnnnnnnnnnnnnnnnnnnnnnnnnnnnnnnnnnnnnnnnnnnnnnnnnnnnnnnnnnnnnnnnnnnnnnnnnnnnnnnnnnnnnnnnnnnnnnnnnnnnnnnnnnnnnnnnnnnnnnnnnnnnnnnnnnnnnnnnnnnnnnnnnnnnnnnnnnnnnnnnnnnnnnnnnnnnnnnnnnnnnnnnnnnnnnnnnnnnnnnnnnnnnnnnnnnnnnnnnnnnnnnnnnnnnnnnnnnnnnnnnnnnnnnnnnnnnnnnnnnnnnnnnnnnnnnnnnnnnnnnnnnnnnnnnnnnnnnnnnnnnnnnnnnnnnnnnnnnnnnnnnnnnnnnnnnnnnnnnnnnnnnnnnnnnnnnnnnnnnnnnnnnnnnnnnnnnnnnnnnnnnnnnnnnnnnnnnnnnnnnnnnnnnnnnnnnnnnnnnnnnnnnnnnnnnnnnnnnnnnnnnnnnnnnnnnnnnnnnnnnnnnnnnnnnnnnnnnnnnnnnnnnnnnnnnnnnnnnnnnnnnnnnnnnnnnnnnnnnnnnnnnnnnnnnnnnnnnnnnnnnnnnnnnnnnnnnnnnnnnnnnnnnnnnnnnnnnnnnnnnnnnnnnnnnnnnnnnnnnnnnnnnnnnnnnnnnnnnnnnnnnnnnnnnnnnnnnnnnnnnnnnnnnnnnnnnnnnnnnnnnnnnnnnnnnnnnnnnnnnnnnnnnnnnnnnnnnnnnnnnnnnnnnnnnnnnnnnnnnnnnnnnnnnnnnnnnnnnnnnnnnnnnnnnnnnnnnnnnnnnnnnnnnnnnnnnnnnnnnnnnnnnnnnnnnnnnnnnnnnnnnnnnnnnnnnnnnnnnnnnnnnnnnnnnnnnnnnnnnnnnnnnnnnnnnnnnnnnnnnnnnnnnnnnnnnnnnnnnnnnnnnnnnnnnnnnnnnnnnnnnnnnnnnnnnnnnnnnnnnnnnnnnnnnnnnnnnnnnnnnnnnnnnnnnnnnnnnnnnnnnnnnnnnnnnnnnnnnnnnnnnnnnnnnnnnnnnnnnnnnnnnnnnnnnnnnnnnnnnnnnnnnnnnnnnnnnnnnnnnnnnnnnnnnnnnnnnnnnnnnnnnnnnnnnnnnnnnnnnnnnnnnnnnnnnnnnnnnnnnnnnnnnnnnnnnnnnnnnnnnnnnnnnnnnnnnnnnnnnnnnnnnnnnnnnnnnnnnnnnnnnnnnnnnnnnnnnnnnnnnnnnnnnnnnnnnnnnnnnnnnnnnnnnnnnnnnnnnnnnnnnnnnnnnnnnnnnnnnnnnnnnnnnnnnnnnnnnnnnnnnnnnnnnnnnnnnnnnnnnnnnnnnnnnnnnnnnnnnnnnnnnnnnnnnnnnnnnnnnnnnnnnnnnnnnnnnnnnnnnnnnnnnnnnnnnnnnnnnnnnnnnnnnnnnnnnnnnnnnnnnnnnnnnnnnnnnnnnnnnnnnnnnnnnnnnnnnnnnnnnnnnnnnnnnnnnnnnnnnnnnnnnnnnnnnnnnnnnnnnnnnnnnnnnnnnnnnnnnnnnnnnnnnnnnnnnnnnnnnnnnnnnnnnnnnnnnnnnnnnnnnnnnnnnnnnnnnnnnnnnnnnnnnnnnnnnnnnnnnnnnnnnnnnnnnnnnnnnnnnnnnnnnnnnnnnnnnnnnnnnnnnnnnnnnnnnnnnnnnnnnnnnnnnnnnnnnnnnnnnnnnnnnnnnnnnnnnnnnnnnnnnnnnnnnnnnnnnnnnnnnnnnnnnnnnnnnnnnnnnnnnnnnnnnnnnnnnnnnnnnnnnnnnnnnnnnnnnnnnnngatcctgtttttttattgtacaaaatatgtaccttcttattaaatttattgctaagaattgtattattttaatgttgttgcaaacaattgttttattaatttactgtcaaattgttcattgttggtatatggaaatgcactttatgtttctgtgttgtaaaaataattatttcatctccaaatctagactagcaattcattcagaataagtatgcagtacaaattggtagtcatttaactttttccaataagctaaccaattacactgtgtctaaatatgtaaaaatgttgaattgtgttagattttcacttaccctcacctgtcatttatcagtcagaattacattactgcacacatagaactttcatttctggggccgggcatggtggctcatgcctatattcctagcactttgtgagaccaaggcaggccgactacctgagatcaggagttcgagaccagcctgaccaacacggtaaaaccctgcctctactaaaaatagaaaaataaactgagtgtggccgtgggagactgtcctccagctactttggaggctgacacaggataatcacttgaacaatcccacaacacaaaacaacaaaagttagtcttcatgtcaaaaatcttcaatggatgtttttcatcacaggattgtttagtgcaacattttatggaaaagatgcatgctactgagatgtagttctccaaaagtatcttagagtttgttgttttgttatgtcttacctcacacacctgtcctgttccaggctatttttcaaagatttttgtatacaaataacctggaaaaagggtagtagtttttctcttcaggtgaatggcagataaattactcaatcaatataataaagacaatttttctctgtgaggcaaagtttggacaggtttgcatgtaacctactttaagaagattaaggtttcttagtcttgagcctgctcagctgtgacacaaatcttccccatgtgcaatgtccatctgagccttttgaaatccctctaaaaaatgtagtatggacaaggagaactaatacaaatatgaggcttttgcctccaggtagacagtaaatagtaggtatttttttcatacttcagtgtctcatgccttctaccagcatccatggaaatggaaggttaataggtttgtttacaaataggatgaaatcttagatccttcacaattatttaattttggagatgacaatgggatgctgagataaacacaactttctgaaaggggaaaatacacaaatacttgaagagcttgcaacggatatgaaaatttcccctaggactaacagcaacttctctcagccaagtggttagtttggtgaaacaagggatcaacactctgctgtctgctaatgagactgatccttgagaggattataacaatgagactgagagctttgcatgttcatttttctcctgctggaaagatcaaggacctcttaaagctaatgttgaggcttggatgagtccaaaacactagaagttcacctctgtgagatgaatgcacacatcacaaagaagtttctcagaatgcatctgtctagtttttatgtgaagatatttccttttccaccataggaggcaaacttctccaaatatacatttgcagatgctacaaaaagagtgtttcaaaactactcaacgaaaagaaaggttcaactctgtgagatgagtgcacacatcacagagaagtttctcagaatgcttctgtctagtttttatgtgaataggtttgttttacaccataggcctctaagcgcttcaaatatccacttgcagattcaccaaaaacagtgtttcaaaactgttcaatcaaaggaaaggtttaaatctgtgagatgaatgcacacatcacaaagaagtttcttaaaatgcatctgtctagttttgatgcaaagatatttgcttttccaccaaaggcctaaaagcactccaaatattcacttgcagattttacaaaaagagtgtttcaaaactgctcaatcaaaagaaaggttcaactctgtgagatgaatgcacaaatcacagagaaatttctcagaatgcttctgtctagtttatatgtgaagatatttccttttacaccatagacctcaaaccgcttcaaatatccatttacagatactacaaaaagagtgtttcaaaactgctcaatcaaaagaaaggttcaactctgtcacatgaacgcgcacatcacaaagaagtttttcataattcttccgtctagtttttatgtgaagatacttccttttacaccgtatgcagcaaagcgctccaaataccctcctgcagattctacaaaatgagtgtttcaacactactcaatcaaaagaaagttccactctgtgagatgaatgcacacatcacaaagaaatttctcagaatgcttctgtgtagtttttatgtgatgatatttccttttccacaataggccttaaagcactccaaatatccacttgcagattctacaaaggagtgtgtcaaaactgtgcaatcaaaagaaagatttaactctgtgagatgaatgcacacatcaccaagaactttctcagaatgcttctgtctagtttttatgtgaagatatttccatttccactgtgggccacaaagggctccaaatatccacttgcagattctacaaaaagagtgtttcaaaactgctaaatcaaaagaaagattctactctgtgagttgaatgcacacatcaaagaagtttctcagagtgcttccatcaagtttttatgtggagatatttccttttccaccataggcccctaagcgctccaaatatccgcttgcaaattctacaaaaagaatgtttgaaaactgctgaatcaaaagaaaggttcaccactgtaagatgaatgtgcacctcacaaagaagtttctcagaaagattctgtctagtttttatgtgaagatatatccttttgcaccgtagacctcaaaacgatccatatatccatttgcagattctacaaaaagagtgtttcaaaactgctcaatcaaaagaaaggttaagttctgtgagatgaatgcacacattacaaagaagtttctcagaatgctgctgtctagtttttatgtgaagatgtttcattttccaccatatgcctcaaagtgctctaaatatccacttgcagattatacaaaaagagtgtttcaaaacagctcaatcaaaagaaatgttcaactctgtgagatgaatgcagacatcacaaagaagtttctcagattgcttctgtctagtttttatgtgaagatatttattttccaccataggccgcaaagcactccaaatatccacttgcagattctacaaaaagagtgtttcaaaaggctaaatgaaaagaaaggttcaactctgtgatatatatgcacacatcacaaagaagtttctcagaatgcttttgtctactatttatgtgaaggtatttccttttccaaaatatgccccaaagtactcctattatccacaggcagattctacaaaaagagtgtctcaaaattgctcaatcaaaagaaaatttcaactctgtgagatgaatgcaaacatcacaaagaagtttctcagaatgcttctgtctagtttttaagtgaagatatttccttttcctccataggcgtcaaagtgctccaaatatcctctagcagattctacaaaaagagtgtttcaaaactgcttaatcaaaagaaatgttcaactctgtgagaggaatgcacacatcacaaataagtttctcagaatgtttcctctagtttttatgtgaagatatttccttttccaccatagtcctcaaagcgctccaaatatccactggccaattctccaaaaagagcatttcaaaactgctcaatcaaaagaaattttcaaatctgtgagatgaatgtgcacatcacaaagaagtttctcagaatgcttctgtgtagcttttatgtgaagatattccattttccacaataggcctcaagtgtctccaaaagtccacttgcagattctacaaaaagagagtttcaaaactgctcagtcaaaagaaaggttaaactctctctgatgaatgcacacatcacaaagaagtttctcagaatgcttccatctagtttttatgtggagatatttccttttccgccatcggcccctaagcactccaaatatccacttatagattcttcaaaaagcgtgtttcaaaactgctgaatcaaaagaaaggttcaactctgtgagttgaatgcacatatcagagaaaagtttctcagaatgcttctatctagtttatatgtgaaggtatttccttttccatcatactcatcaaagcgttccaaatattcacttgcacattctacaaaaagagtgtatcaaatctgctcagtgaaaagaatggttcaatttggtgagataaatgaacacatcatgaggaagtttcgcagaatgcttctgtctagtttttctgtgaaaatattgcctttactaccataggacacaatcgctccaaatatctactttcagattctacaaaaagggtgtttcaatactgctcgatgaaaggaaagattcaacctggtgagatgaacgcacacatcacaaagaagtttctcagaaggcttctgtctagtttttatgtgaagatatttccttttacaccataggccacaattcgctccaaatatccacttgcagattcatcaaaaagactgtttcaaaaccctcaatcaaaagaaagtttcaacactgtgagatgaatgcacacatcacaaagaagtttctcagagtgcttctgtctagtttttatgtgaagatatttccttttccaccagagaccacaaatcgctccaaatacccacttgcatatacaacaaaaagagtgtttcaaaactgctcaatcaaaagaaaggttcaactctgtgagatgaaggcacttatcacagagaagtttctcagaatgcttctgtctagtttatatgtgaagatatttccttttccacgatagacctcaaaccgcttcaaatatccatttacagatactacaaaaagagtgtttcaaaactgttcaatcaaaagaaaggttcaaatctgtgagttgaatgcacagatcgccaaaaatttctcagaatgcttctgtctagtttttatgtgaagatagttccttttccacaataggccccaaaacgctccaaatatccccttgcagatactacaaaaagatgctttaaaaactgctcaatcttcttaatccagtctatatacaccatggaatactatgaagccataaaaagtgatgagttcataacctttttagggacatggatgaaattggaagtcatcattctcagtaaactatcgcaagaacaaaaaaccaaacaccgcatattctcactcataggtgggaattgaacaatgagatcacatggacacaggaaggggaacatcacactctggggactgttgtggggtgggaggaggggggagggatagcattgggatatatacctaatgctagatgacaagttagtgggtgcagcacaccagcatggcacatgtatacatatgtaactaacctgcacaatgtgcacatgtaccctaaaacttaaagtataataataataataataactgctcaatcaaaagaaatgttcaactttttgagatgaacacacacatcacaaagaagtttctcagcatgcttctattttttatgtgaagatatttccttttccaaaataggccagaaaggtctgcaaatatccacttgcagattttacaaaaagagagaatcaaaacttctcaatcaaaagataggttcagctgtgtgagtctaatgcagacatcacaaaaaagtttctgagaatgcttctgtgtagtttttatgtgaagatatttccttttccaccataggcctcaaagcgctccaaatatccacttgcagattctacaaaagagtgtgtccaaactggtcaatcaaaagaaaggatcaactctctgagatgaatgcacacatcacaaagaagtttctcagaatgcttctgtctagtttttatgtgaagatattttcttttccacaacaggccacaaagcactctaaacatccacttgcagattctacaaaaagacggtttcaaaactgctcaatcaaaagaaaggttcaactctgtgagatgaatgtacacattacaaagacgtttctcagaatgcttcttcatagtttttatgtgaggatatttccttttccaccataggtctaaatgtgctccaaatatccacttgcagattctacaaaaagagtgattaaaaactgctcaatcaaaggatagattcaactcggtgagatgaatgcacacatcccaaataagtttctcagaatgcttctgtgtagtttctatgtgaagatatttccttttccaccaaagatctcaaagcgctaaaaatatccccttggagattctacaaaaagaatgtttccaaactgctcaataaaaagaaaggttcaactctgtgtgatgaatgcacacgtcacaaagtagtttctcacaatgcttctttgtagtttttatgtgaagatatttccttttccacaataggcctcaaagtgctcgaaacattgacttgcacattctacaaaacgagtgtttcaaaactgctcaatcaaaagaaaggttcagctttgtgagatgaatgcacacaacacaaagaagtttctcagaattattttgtgtggtttttatgtgaagatatttcctttttcacacttggccacacaacgcaccaaatatccacttacagaatctgcaaagacagagtttcaaaactgctctataaaaagataggctcaacccggtgacttgaatgcacacatctcaaagaggtgtctcagaatgcttctgcgtactttttgtaaagatatttccttttacaccattcaccacaaagtgctccaaacatccacctgcagatgttacaaaaagagtgtttccaaactgatcaatgaaaagaaaggttcaactctatgagacgaattcacacatcatgaagaagtttctcacaatacttttgtgtagtttttatgtgaagatatttccttttccaaaataggccttaaaggactccaaatatccccttgcagattctacaaaaagggcgtttcaaaagtgctcaatcaaaagagaggttcaactctttgaggggaatgcacgcatagcaaagaagtttctcagaatgcttctgtgtagtttttatgtgaagatatttccttttccacagtaggcctcaaagggctacaaatatacacttgcagattctacaaaaagagtgtttcaaaactgttcaatcaaaagaaaggttcaactctgtgagttgaatgcacacatcataaagaagtttctcagaatgcttatgtgcagtttttatgtgaagatatttccttttccacaatttgcctcaaagcactccaaatatccacctgcagattctgtaaagattgtttccaaactgctcaaagaaaagaaaggttcaacttcgtgagattaatgcactcatcacaaagtagtttatcagaatgcttctgtgtcatttttatgtgaagatattttcttttccacagtaggcctcaaagtgtttcaaatatccacttgcttattctattaaaagagagtttccaaactgttcagtctaaagaaaggttcaactctgtgagatgaatgtgcacatcacaaagaagtttctcagagttcttctgtgtagtttttatgtgaaggtatttccttttacacagtaggccacaaagggctccaaatattcacctgcagattctccaaaaagagagtttctaaaatcctctaccaatagataggtacaactctgtgagttgaatgcacacatcacaaagaagtttctcagaatgcttctgtgtagtttttatgtgaagatatttcaatttccacaatagtcctcaaagcgctctaaatatccacttttagattctactaaagagtgttttcaaactgctcaatcaaaagaatggtaaaacactgtgagatgaatgcaaaaatcacaaagaagtttctcagaatgcttctgtgtagttttcatatgaagatatttccttttccacaatgggcctcaaagcgctctgtgagatgaatgcacacgtcacaagacatttcccagaatgattctgtgtacttttcctgtgaagatacttccttttccacaatagtcctcaaagctttccaaatatccacttgcagattctacaaaaagtgtgtttcaaaagtgctcaatcaaaagaaatgttctactctgtgagatgaatgcaacatcaccaagaagtttctcagaatgcttccgtgtagtttttatgtgaagatatttccttttacaccatagacctcaaatcgctccaactatccacttgcagattctacaaaaagagtgtttccaaactgctcattcaaaagaaaacttcaactctgtgggatgagtaaacacctcgcaaagaagtttcacagaatgattctgtgtagtttttatgtgaagatatttccttttccacaataggcctcaaagcacccctaatatccacttgcagattctacaaaaagagtgtttcaaaactgctcaatcaaaaaaagtttcaattctttgagttgaaagcatacatcacaaagaactttctaagaatgcttctgtatagtttttatgtgaagatatttcattttccacaataggcctcaaagagctccaaatgtccacttctagtcactacaaaaagagagtttccaaagtgctaatgaaaagaagggttcaattctgtgagatgaatgcatacatcacaaagaagtttctcagaatgcttctgattactttttatgtgaagatatttccttttccacaatagacctcaaagggctccaaatatccactttcagattgtactagaagagtgtttcaaaaatgctcaatcaaaagaaagtttcaactttgtgaggtgaatgcacacatcacaagaaatttctcagaatgcttctgtgtaatttttatgtgaacatacttccctttccacaatagtcaacaaagccctgcaaatatacacttgcacattctagaaaaagagtgtttcaaaactgctcaatcaaaagaatgtttcaaccctgtgaggtgaatgcacacatcacaaagaagtttctcagaatgcttccgagtagtttttatgtgaagatatttccttttcaaccgtaggcctaaaagcactccaactattcacttgcagattctacaaaaagagtgtttccaaactgctcaatcaaaagaaaacttcaactccatgaggtgagtaaacacaatgcaaataagtttcacagaatgattctccatagtttttatgtgaagatatttccttttccaccacaagccgcaaatgtctttaaatatccacttccaggttctacaaaaagagatattcaaaactgcttaatcaaaaggtaggttcgactctgtgagttgaatgcatacatcacaaagtagtttctcagaacgcttctgtgtagtttttatgtgaagatatttccttttacaccataggcctcaaagcgctccaaatatccacctggagattccaagaaaagagaaattcaaaactgcttatcaaaagataggttcaactccgagagttgaatgcacacatcacaaataagtttctaagaatgcttctgtgtattttttatgtgcagaaattaccttttcctcagtacaccttacagagctgcaaatatctacctgcagatcgcactaaaagagtatttcaaaactgcacaatcaaaagaaaggttcacctctgtgaaatgaattcacacatcacaaaaagtatctcagactgttcctgtgtagtttttatgtgaagatacttccttttacacaatagctgtcaaacgctccaaatatccactagaagattctacaaaaagagtatttcaaaactgcttaaacaaaagaatgcttcaactctgtcagatgaatgcacacatcacaaagaagtttctctgaatgcttctgtgtagtttttatgtgaagatatttccttttccactgtaggctgcaaaaggctccaaatatccacatggagattctacaaaaagaatgtttccaaactggtcaatgaaaagaaagatacaactctgtgagttgaatgcacacatcacaaagaagtttctcagaattctactgtgtagtttctatgtgtagatattttcttttccacaaaaggcctcaaagcgttccaattatccacttgcagattctacaaaaagattgttacaaaactgctcaatgaaaagaacggttcaactcagtgggtggaatgcacacatcacaaagaagtttctcagaatgtttatgtgtaatttttatgtgaagatagttccttttccgcaataggcctcaaagcgctccaaatatctacttgcagattctacaaaaagtgtttttcaaaactgctcaatcaaagcaaaagttcaactctgagatgaatgcccacatcacaaagaagtttctcagaatgcttctgtgtagttttcatgtgaagataattcgttttccacaataggcctcaaagcaccccaaatatccattgcatattctactaaaagcatgttataaaactgctgaatcaaaagaaaggttcaactctgtgagatgaatgcacaagtcaaaataaagtatctcagaatgattctgtgtagtttttgatgaagatacttccttttccacaaaagaccttaaagggctcctaatatccacttgcagattctacaaaaagagagattcaaaactgctcaatcaaaagataggttcaactgtgtgagttgaatgcacacatcacaaagaagtttctcagaatgcttctgtgcagtttttatgtgaagatacatgcttttccacagtaggcctcgaagcgcaccaaatatccacttgtagattctacaaaaagagtgtttccaaactgctcaatcaaaagcaagtttcaactctgtgagatgaatgcacataacacaaagtagtttctcagaatgcttctgtgtattttttgtgtgaagatatttccttttccacaataggcctcaaagccccccaaatatccacttgaagattctacaaaaagagggttttaaaactgctcaatcaaaagaaagtttcaactctgtgagatgtatgcacacatcacaaaaaagtttctcagaatccttctgtgtagtttttctgtgaagatatttccttttccagaatagccctcaaggcgctccaaatatccacttgaagattctgcaaaaagagtatttcaaaactgcttaatcaaaagaatgcttcaactccgtgtgatgaatgcacatatcacaaagaagtttctcagaatgctactgtgtagtttttacgtgaagatatttccttttccaccataggctgctacgtggtccaaatatccacctgcagattttacaaaaggagagtttcaaaacttctcaatgaaaagataggttcaactatgtgagttgaatgcacacatcacaaagaagtttcccagaatgcttctgtgtagtttttatgtaaagatatttcctttctcaaataggcctcaaagtcctgtaaatatacacttccggattctacaaaagagtgtttcaaagctgctcaatcgaaggaaaatttcaactctttgtgatgtatgcactcatcacaaagtagtttctgtgaatgcttctgtgtagtttttatgtgaagatatttcctttttcacaactccaaatatccacttccagattctacaaaaagagagtttcaaaactgctcaatcaagagataggttcaaccctgtgagttgaatgcacacatcagaaaaaagtttctgaaaatgcttctgtgtagtttttatgtgaaggtatttccttttccaacataggcctcaaagtgatcaaattatccacctgaagattctacaaaaagtgtgtttccaaactgttcaatgaaaagaaaggttcaaccctgtgagatgaatgcacacatcacaaggaagtttctcagaatggttctgtgtagtttttatgtgaagatgtttccctttacacgataggcctcaaagggctccaaatatccagttgaagattatacaaaaagagtgtgtccaaactgctgaatcaaaaggaaagttcagctctgtgagataaaagtacacatcacaaagaagtttctcagaatgcttctgtgtagtttttatgtgaagatgtttccttttccaccataggccgccaaggtctccaagtatccactttcagattctacaaaaagagagattcaaaagtgctcaatcaaaagatagattcaaaactgtgagttaaatgcacacataacaatgaagtttctcagaatacttctgtgtagtttttatgtgaagatatttccttttacacaatacgcctcaaagcactaaaaatatccacttgcagattctacaaaaatagtgttttaaaactgctcaatcaaaagaaagtttcaactctgtgaggtgaatgcccacatcacaaagaagtttcttagattgtttatgtgtagtttttatgtgaagatatttacttttccactgtcggcctcaaagtgctccaaatatcaacttatagactcgcaaaaacagtgtttcaaaaccgcttaatgaaaaactaggttcatctctgtgagatgaaggcacacatcacaaagaagtttctcagaatgcttctgtgtagtttttatgggaagataattcctgttccaaaataggcctcaaagccctccagatatccacttgcagactctacaaaaagtgtgtttcataactgttcagtcaaagaaattttcaactctgtgtggtgaatggactcatcacaaagtagtttctcagaatgcttctgtgtagtttttttgggaagatatttcctttatcacaagaggccacaaagggctcctaatatccacttgcagattctacaaaaagagagattcaaaactgctcaatcaaaagataggttcagctctgtgtgattaatgcactcatcacaaagaagtttctcagaatgcttctgtgcagtttttatgtgaagatacatgcttttccacaatagtcctcaaagtgctccaaatttccacttgcagattttataaaaagattgtttcaaaagtgctcaatcataagataggttcaactctgtaagatgaatgcacacatcaaaaagaagtttctcagaatgcttctatgtagtttttacttgaagatatttccttttccaccttatgctgtaaagggctccaaatatccacttgtagattcttcaaaaagagagattcaaaactgctcaatcaaaagatagatttaactacgtgagttgaatgcacatatcttaaagatgtgtctcagaatgcttctgtcagaaagcttctgtgcagtttttattggaagatatttccttttcctctataggctgcgaagggctacatatatccacttgcagattctacaaacagagagattcaaaactgctcaatcaaaagataggttcaaccttgtgagttgaatgcacacatcacaaagtagtttctcagaatgcttctgtgtattttttatgtgaagatatttacttttccacaataggcctcaaagagctccaaatatccacttgtagatacacaaaaagagtgtttcaaaacttctcaatcaaaggaaaggttcaactctttgagatgaatgcgcccatcacaaagaagtttctcagaatgcctctgtgtagtttttatttgaagatatttgcttttccgcagtaggcctcaaagcactccaaatatccagttgcagattctacaaaaatagtgtttcaaaagtgctcaatcaaacaaaagttcaactctgtgagatgaatgcacacatcacaaagaagtttctgagaatgcttctgtgtagtttttatatgaagatatttccttttccacaataaacctcaaagtgctccaaatatccacttgcagattctacaaagagagtgtttcaaaactgctcaatcataagataggttccacacagtgagatgaatgcacaaataacaaagaagtttctcagaatgcatctgtgttgtttttatttttagatgtttccttttactgcataggctgcaaagggctcaaaatatccacctgcagattctacaaaaagagagattcaaaactgctccatcaaaagaaaggctcaactctgtgagatgaatgcacacatcacaaagaagtttctcagaatgcttctgtgtagttttcatgtgaagatattgcttttccacagtagccctcaaaccgctccaaatatccacttgcagattcttcaaaagcagtgtttcaaaacagctcaatcaaaataaacgttcaactctgtgaaatgaatgcactcatcacaaagaagtttctcagaattcttctgtgcagtttttatgtgaaattatttccttttccaccacaggctgcaaagggctccaaatatccacttgcagattctacaataagagagattgaaaactgcacaatcaaaagataggttcaactctcctagttgaatgcacacagcacaaagaatttcctcagaatgcttctgtgtagttttctttggaagatatttccttttccaccataggacccaaactctctaaatatccactagcagattctacaaaaagagtgtttccaaactgctcagtcaaaagaaaggttcaactctgtgagatgaatgcaaacatcgcctagaagtttctcagaatgcttctgtgtagtttttatgtgaagatattttcttttcctaaatagtcctcaaagcaccgcaaatatccacttgcagattctacaaaaagaatgttccaaagctgctcaatcaaaagaaaggttcaattctgtgagatgaattcacacatcacaaagcagtttctcagaatgcttctgtgtagtttttatatgaagatacttgtttttccacagtagacctccaagcgctcaaaatatccacttgcagattctacaaaaacagtgtttcataactgctaaattgaaagaaatgttcaactatttgagatgaatgtacacatcacaaaggagtttctcagaatgcttctgtgtaatttttatgtgaagatatttccttttccacaataggccacaaagcgctcaaaatatccatgtgctgattctacaaaaacagagtttcaaaactgctcaatcataagataggttcaactctgtgagatgaatgctgacataacaaagatgtttctcagaatgtttctgtgtagtttttatttgaagatatttccttttccaaaataggcagcaaagggctccaaatatccacttgcagattctgcaaaaagagaaattcaaaactcctcaatcaaaaaacaggttcaactctgtgagttgaatgcacacatcacaaatacgtttctcagaatgcttctgtgtagttcttatgtgaagatatttccttttacacaggagacctcaaaggcctccacatatccacttgcagattctacaaaaagtgtgttgcaaaactgctcaatcaaaagaaaggttcaactctgtgagatgaatgcacacatcgaaaagaagattctcagaatgcttctttgtagtttttatgtgaagatatttgcttttccacagtaggcctcaaaatactccaaatatccaattgcagattctacaaagagagtgtttccaaactgctaaatcataagataggttcaactctgtgagatgaatgcacacatcacaaagaagtttctcagaatgcttctgtgtagtttttatgtgaagatatttccctttacacaatgggcttcaaagtgctccaaatatccacttgcagattcaacaaaaagagtgtttcaaaactgctcggtcataagataggataaattctatgaaatgaatgcatacatcacaaacaagtttctcagaatgcttctgtgtagtttttatttgaagatatttccttttccacgctaggctgcaaagggctccagatatccacttgcagattctagaaacagagagattcaaaactgctcaatcaaaggataggttcaactccataagatgaatgcacacatcacaaagaactttctcagaatgcttttgcatagtttttatgtgaagatatttccttttccacaatggcatcaaagcgctccatatatccacttgcagattctacaaaaagagtttttcaaaactgcactgtcaaaagaaaagttcaactctgtgagatgaatgcccacatcactaagaagtttctcagaaggcttctgtgtattttttatgtgaagatatttgcttttccaaagtagaccccaaagtgctccaaatatgcacttgcagattcttcaacaagactgtttcgaaactgctcaatcaaaagaagtgttcaactctgtttgatgaatgcactcatcacaaagatgtttctcagaatgcttctgtgaagtttttatgtgaagatatttccttttccaccataggccacaaagggctcaaaatatccacttgcagattttacagaaagagagattcaaaactgctcaatcagaaggtatgttgaaatctgtgagacgaatgcactcatcacaaagaagtttctcagtatgcttctgtgtagtttttatgtgaagatatatccttttccacaaaaagcctcaaaacgctccaaatacccacttgcagattctacaaagagagtgtttcaaaacagctaaatcataagataggttcaattctgtgagatgaatgcacacatcccaaagaagtttctcagaatgcttctgtgtagtttttatgttaagatatttccttttccacaataggcttgaaagtgctccaattatccactttcagattctacaaaaagaatgtttcagaactgatcaatcataagataggttcaactctgcgagatgaatgcacacatcacaaagatatttatcagaaggattctgtgtagtttttatccgaagatacttgcttttccacagatggcctcaaagcactccaaatatccacttgcagattcaataaaaacagtgtttcaaaactgctgaatcaaaagaaaggttcaactctgtgagatgaatgcacgcatcacaaagaagtttctcagaatgcttctgtgtagtttttaattgaaggtatttccttttcctccatgggctgcaaagggctccaaatatccacttgcagcttctacaaaaagagagattcaaaactgctcaatcaaaagataagttcacctctgtgagtctaatgcacacatcacaaagtagtttctcagaatgcttctgtgtagtttttatgtgtagatatttcgttttccacaatagacctcaaagctttccaaatatccacttgcagattctacaaaaagagggttgcaaaactgctcattcaacggaaatttcaactcttttagatgaatgcacacatcacaaagaaattactcagaatgcttctgtgtagtttttatgtgaagatatttgcttttccatagtaggcctcaaagtgctccaatatccacttgtaggttttacgaaaacagtgtttcaaaactgtccaatcaaaggaaagtatcaactctgtgagatgaatgcacacatcatgaagaagtttctcagaatacttccatataattttaatgtgaagacatttgcctttccaccggaggcctcaaagcactccaaatatccacttgcagattctacaaagcgaatgtttcaaatctgctcaatcataagataggttcaactctgtgatatgaaggcacacatcacgaagaagtttctcagtatgcgtctctgtagtgtttactagaagatatttccttatcgtccataggccacaaagtgctccaaatatccacttgcagattctagaaaaacagagattcaaagctgctcaatcaaaagataggttcaagtctgcgagttgaatgcacacatcacaaagaagtttctcagaatgcttctgtgtagtttttatgtgaagatatttcattttccacaataggcctcaaagcactccaaatatccacttgcagattctacaaaaagagttttcaaaacttctcaatcaaaacgaaagttcaactctgtgagatgaatgcacacttcacacagaagtttctcaaaatgcttctgcgtagtttctatttggagatatttccttttccaatgtaggccacaaagggctccaaatatccacttgcagattctacaaaaaaagtgtttcaaaagtgcacaatcaaaagaaaggtgcaactctgtgagatgaatgcacacatcacaaagaagtttcacagaattcttctgtgtagtttttatgtgaagatatttccttttccaaaacaggcctgaaagccctccaattatcaactttcagattctacaaagagagtgtttcaaaactgctcaatcataagataggttcaaatctatgagatgaatgcacacatcacagagaagtttcttagaattcttctgtgtagtatttatttgaagatatttccttttcctctgtaggccgcaaagagcttcaaatatccacttgcagattatacaaaaagagaaattcaaaactgctcaatcaaaagataggttcaactcagtgatttgaatgcacacatcacaaacgagtttctttgaatgcttctgtgtagtttttatgtaaagatatgtccttttccataataggtctaaaagggctccaaatatccagttgcagactctacaaaaagagagattcaaaactgctcaatcaaaacaaactttcaactctgtgggatgaatgcacacatcacaaagaagtttctcagaatgcgtctatgtagtttttacatgaagatatttgcttttccacagttgacctcaaagcggcctatacagattctatacaaacagtgtttcaaaactgctcaatcaaaaggaaggttcaactctgctcaatgaatacccacatcacaaagtagtttctcagaatgcttctagtagtttttatgtgaagatatttccttttacacaataagtcacaacgcgctcaaaatatccacctgaagtttctgcaaagagagtgtttcaaaactgctcaataataagatagattcatctgtgtgagatgaatgcacacatcacaaataagtttctcagaatgcttctgtgtagtttttatttgaagatatttcctttacctccataggccacaaagggctccaaatatccacttccagattctacaagaagagagattaaaaacttcacaatcaaaagataggttcaactctgtgagttgaatgcacacatcacaaagtagtttctcaggaagcttctgtgtattttttttgttaagatatttccttttcaacaataggactcaaaacactgcaaatatctactttcatattatacaaaaagagtgtttcaaaactgctcaatcaaaataaagtttcaactctgtgagatgaatgcagacatcacaaagaagtatctcagaatgcttctgtgtagtttttatgtaaagatatttgcttttccacagtaggactcaaagcgctccaaatttccattgcagatactacaaaaacagggtttcaaaagtgctcaatcaaaagaaagtttcaactctctgagatgaatgcacacatcacaaagaagtttctgtgaatgcttctgtgtaatttctatgtgaagacatttctttgccacaataggcctccaagctctccaagtatacacttgcagattttacaaagagagtttttcaaaactgctcaatcataagataggttcaactctgtgagatgaatgcatacagcacaacgaagtttctcagaatgattctgtatagtttttatgtgaagatatttgattttccacagtaggcctcaaagcgctccaaatatccccttgcagattctacaaaaacagtgttttagaactgctgaaatatacgttaggttcaactctgtgagatgaatgcacgcatcacaaagaagtttctcagaatgcttctgtgtagttttcatgtgaagatatttccttttcctccataggatgcaaagggctccaaatatccaattgctgattctacaaaaagagagattcaaaactgctcaatcaaaagattagttcaacaatgtgagttgaatgcacacatcacaaagatgtttctcagaatccttctgtgtagtttttatgtgaagatgtttccttttccactataggcctcaaagcgctcaagtatccaagtgtagattctacaaaaagagtgtttcaaaactgttcaatcaaaagaaaggttcaattctgtgagatgaatgcatacatcacaaagaattttctcagaatgattctgcgtagtttatatttgaagatatttccttttccaacgtaggtcttaaagagctccaaatatccacttgaagattctacaaaagagagattcaaaactgctcaataaaaagatatgttcaactctatgagttgaatgcactcatcacaaagaagtttatcagaatacttctgagtagttgttatgtgaagatatttccttttctaccatatgccgcaaagggctccaaatatccacttgcacattctacaaaaagtgagattcaaaactgctcaatcagaagacgggttcaactctgtgtgttgaatgcacacatcgcaaagaagtttctcagaatgcttctgtgtagtttttattggaagatatttcctttaccataataggtctcaaagcgctccaaatatctacttgcaatttctaaaaaaagagtgtttaaaaactgctcaatcaaaagaaaggttcaactctctgagatgaatgtacacgtcacacagaagtttctgagaatgcttctgtgtagtttttattggaagatatttccttttcctccatatgtcagaaagggctccaaatgtccacttgcagattctacaaaaagacagattcaaaactgctcaatgaaaagagaggttcaacactctgagttgaatacacacatcaataataagtttctcagaatgcttctgtatagtatttatgtgaagatatttccttttccacaataagcctcaaagcactccaaatatccacttgcagatactagaaagagagtgtttcaaaactgctcaatcataagataggttcaaccctgtgagatgaatgcacacatcacaaagaagtttttcagaatgcttctgtgtagtttttatgtgaagatacttgcttttccgcagtgagcctcaaaaccctgcaaatactgacttgcagattctacaagaacagtgtttgaaaactgctgaatcaaaagaaagttggaatttcgtgtgatgaatgcatacatcacaaagaagtttctcagaatgcttctgtgtagtttttatgtgaagctatttctttgccatagtaggcctcaaagcactccaagtatccacttgcagattctacaaagagagtgtttcaaaactgcttaatcataagataggttcaactctgtgagacgaaaacaaacatcacaaagaagtttctcagaatacctctgtgtagttcttatttgaaggtatttccttttccttcgtaggtggcatagggctccaattatccacttgcagattctacaaaaaaagagatgcaaaactgcttaatcaaaagataggttcaactctgtgagttgaatgcaaacatcacaaagatgtgtctcagaatgcttctctgtagtttttatgtgaacatatttccttttccacaataggcctcaaagtgctccaaatatccacttgcagatactacaaaaagagtgtttcaaaactgctcaatgaaaagaaaggttcaactctgtgagatgaatgcacacatcacaaagaaatttctcaatatgcttctgtgcagtttttatgtgaacatatatgcttttccaccgtaggcctccaagggctccatatatccacttgcagattctacaaaaacagtgtttcaaaactgctcaatcaaaataaatgttgaacactgtgagattaatccacacatcacaaagaagtttctcagaatgtttctgtgtagtttttatgtgaagatatttcctttcccacagtaggcctcaaagcactccaaatatccacttgcagattctagaaagagagtgtttcaacactgctcagtcataagataggttcaaccctgtgagctgaatgcacgcatcacaaagaagtgtctcagaattcttctgactagtttttatatgaagatatttccttttccaccataggccttaaagcgctacaaatgtacacttgcatatcctacaaaaagtgtatttcctaactggtccatcaaaagaatggttcaaatctgggagatgaatgcacacataacaaagaagtctttcagattgcttctgtctagattttatgtgatgatatttccttttctaccataggccacaaagcattccaaatgtccacttgcagatactacaaaaagagtgtttccaaactgcttcatcaaaagaaatgttcaactctgtgagatgaacacaatcatcacaaagaagtttgtcagaattcttctgtctagtttttatatgaagatacttccttttccaccttaggcctaaaggtgctcacaatgtccacttgcagattctacaaaaagagtatttcaaaactgttccaccaaaagaaagattcaactctgagagatgaatgcacacatcacaaagaagtttctcagaatgtttctgcgtagtttttatgtgaagatatttccttttgcactacaggcctcaaagcactctaaatgtccacttgcagattctacaaaagagagtttcaaaactactcaatgaaaataaaggtttaactctttgagatgaatgcacacatcacaaagaattttctgagattgcttttgtctagattttaagtgaagatacttccttttctacaataggccacaaagcgatccaaatgtccatttgtagattctacaaaaagagtgtttccaaactgctgattcaaatgaaaggttcatctttgtgagaaaggcataacacatcaaaaaaagtttcttagaattattctgtctagtttttatgtgaagatatgtccttttccaccaaaggcctcaaaaagctccaaatgtccacttgcagattctacaaaaagagagtttcaaaactgcacaatcaaaagaaagtgttaactctgagatgaacgcacacatcacaaagaagtttctcagattgcttctgtctggattttatgtgaaggtatttccttttctacaataggctgcaaagcgctccaaatatccacttgcagattctacaaaaagagtgtttccaaactgctcaatcaaaagaaaatttcaattctgtgagatgaacacacacaacacaaagaagtttctcagaattcctctgtctagtttttatgtgaagatatttccttttccaccataggagtcaaaactctgcaaatgtccacatgcagattctacaaaaagaatgtttccaacctgctcaatcgaaagaaagttcaactctgtgagatgaacgcacacatcacagagtaatttgtcagaattcttctgtgtagtttctatttgaagatattaccttttccaccataggcctcaaagtgctccaaatatccactttcagattctgcaaaaagagagtttcagaactgctctatcaaaagaaaagttcaactctgtgagatggatgcacacatcccaaagaaatttctcagattgcttttgtctagatttcatgtgaagatatttccttttataccataggccagaaagcactccaaatgtccatttgcagattctacaaaaagacagtttccaaagtgttcaatcaaaagaaaagttcaactctgtaagatgaacgcacacatcacaaagaagtttctcagatcgcttctgtatagattttatgtgaagatatttccttttttaccataggccacaaggtgctacaaatgtccacttgcagatactacaaaaagagcgtttaaaaattgctcaatcaaaagaaaggttcaactctgtgagaataacgcacacatcacaaagaagtttctcataattcttctgtctagtttttatgtgaagatatttccttttccacaataggcgttaaagagctccaaatgtccacttgcagattctacaaaaagagactttaaaaactgctcaaccaaaacaaaggttaaactctgtgaatgaatgcacacaacacaaagaagtttctcagattgcttctgtctagattttatgtgaagatattttcttttctaccataagttgcaaatctctccaaatttctacttgtagattctacaaaaagagtgtgtccaaactgctcaataaaaaggaaggttcaactctgtgagatgaatgcacacatcacaaagaagtttctcagaattcttctgtctagtttttatgtgaggatatttccttttccagcatcagccacaaagcgctccaaatgtccacttgcagattctacaaaaagagagtttcaatactgctcaatcaacagaaagttttaactctgtaagatgaacgcacacatcacgaagaagtttctcagattgcttttgtctagattttatgtgaagatattaccttttctaccatagaccgcaaagtgctccaaatgtccatttgcagattctacaaaaacattgattccaaactgctctatcaaaagaacggttcaaatctgtgagatgaacgcacacatcaacaagcagtttctcagaattcttctctctagtttttatgtgaagatatttccttttccaccataggcctcaaagcgctccaaatgtccacttgcagattctacaaaaagagagtttcaaaactattctatcaaaagaagggtttcagcctgtgagatgaatgcacacatcacaaagcagtttctcagattgcttctgtctagattttatgtgaagatatttccttttctaccataggccacaaagctttccaaatatccacttgcagattctacaaaaagagtgtttccaaactgttcaatcaaaagaaagtttcaactctttgagatgaacgcacacatcacaaagaagtttctcggaattcttctgcctagtttctatgtgaagacatttcctttaccaccatattcctcaaagagctccaaatgtccacttgtagattttaaaaaaagagtttcataaatgctcaatcaaaagaaagttttaactctgtgagatgaatgctgacatcacaaagaagtttctcagattgcttctgtctagattttatgttaagatatttccttttctactgaagactgcaaagcgcacctaatgcccacttgcagattctgcaaaaagagtgtttccaaactgctcaatgaaaagaaaggttcagctctgtgagaagaacgtacacatcacaatgtagattctcagaattcttttgtctagtttttatatgaacatatctcggtttctaccataggcttcaaagtgttccaaatgtccacttgcagaatctacaaaaagagagattcaaaactgcttaagcaaacatacgattaattttgtgagatgcatgcacacatcacaaagaagtttctcagattgcttatgtctacatttaaggtgaagatattttcttttctaccagaggaagcaaagcgcttcaaatgtccacttgcagattctacaaaaagagtgtttcaaaactgctcaatgaaaagaaaggttcaatcctgtgagatgaatgcacacatcacaaagaagtttctcagaattcttctgtctggcttttatgtgaagatatttccttttccaccataggcctcaaaacgctccaaatgtccacttgaagattctacaaaaagagatttcaaaactgctcaaacaaaactttaactctgtgagatgaatgcacacatcacaaagtagtttctcagattgtttctgtctagattttatgtgaagatatttccttttctaccatagtctgcaaagcactccaaatatccacttccagattctacaaaaagagtgtttccaaactgctgagtcaaaataaaggttcaactctgtgggatgtaagcacaaatcacgaagaagtttctcagaattattctgcctcgtttttgtgtgaagatatttccttttccaccataggcctcaaagtgctccaaatgtccacttgcagattgtacaaaaagagagtttcaaaactgctcaatcaaaagacagctttaactctgtgagatgaatgcacacatcacaaagaagtttctcagattgcttctgcctagattttatgtgaagatatttccttttctactataggccataaagcattccgaaagtccacttgcggattctacaaaaagagtgtttccaaactactcaatcaaaagaacgtttcaactctgtgagatgaaggcacacatcacaaagaagtttctcggaattcttctgtctaatttttatgtgaagacatttcattctccaccataggcctcatggctgtcgaaatgtccacttgcagattctacaaaaagagtatttcaaaactggtccatcaaaagaaagtttcaactctgtgagatgaatgcacccatcacgaagaagtttctcagaatgtttccatctaggtttatgtgaagatatttccttttccaccacaggtctcaaagcgctccaaatgtccacatgaagattctacaaaaagagagtttcaaaactgctcagtcaaacaaagggttaactctgtgagatgaatgcacacatcacaaagaagtttctcagattgcttctgtctagattttatgtgaaggtatttccttttctaccataggccaccaagtgctccaaatgctcacctgcagattctacaaaaacagtgtttccaaactgctcaatccaaagaaagtttcaactctgtgagatgaacatacacatcacaaagaagtttctcagaatgcttctgtatagttttttatgtgaagatatttccttttctaccataggccacaaagcgctccaaatgtccacttgcagattctacaaaaagagtgtttccaaactgctcaatgaaaagaaaggttcaatcctgtgagattaacgcacacatcacaaagaagtttcttggaattctactgtctagtttttctgttaagatatttccttttccaccataggcctcaaatcgctccaaatgtccacttgcagattctagaaaaatagactttcaaaacttctcaatgaaaagaaaagtttatctctgtgggatgaatgcacacatcacaaagtagtttttcagattgcctctgtctagattttgtgtgaagatatttgcttttccaccatagacctcaaagcgttccaaatgtcctcttgcaggtggtacaaaaatagagtttcaaaactgcttcatcaaaacaacggtttaattctgtcagatgaatgtacacatcacaaagaagtttctcagattgcttctgtctagattttatgtgaagatatttcattttctgtcataggccgtaaagcgctccaaatgtccagttgcagattctacaaaaagagtctttccaaactgctgactcaaaagaaagtttcaactctgtgagatgaacgcatacatcacaaagaagtttctcagaattattctgtctagtttttatgggaagatatttccatttcaaccattggcctcaatgcgctccaaatgtccacttgcagattctacaaaaagagagtttgaaaactgctaaatcaaaagaaatattgaagtctgtgagatgactgtgcatatcacaaagaaatttctcagattacttctgtctagattttatgtgaatatattcccttttttaccaaaggccgcaaagcgctcgaaatgacaatttgcagattctacaaaaagtgtgtttgcaaactgctaaatcaaaaggaatgttcaactctgtgagatgaacacacacatcacaaagttgtttctcagaatatttctgcctagtttatttttatttatttttattttttattattatactttaagttttagggtacatgtgcacatcgttcaggttagttacatatatatacatgtgccatgctggtgcgctgcacccactaactcgtcatctagtattaggtgtatctcccaatgctatccctcccccctccccccaccccacaacagtccccagagtgtgatgttccccttcctgtgtccatgtgttctcattgttcaattcccacttatgagtgagaatatgcggtgtttggttttttgttcttgtgatagtttactgagaatgatgattttcaatttcatccatgtccctacaaaggacatgaactcatcattttttatggctgcatagtattccatggtgtatacgtgccacattttcttaatccagtctatcattgttggacatttggcttggttccaagtctttgctattgtgaataatgccgcaataaacatacgtgtgcatgtgtctttatagcagcatgatttgtagtcctttgggcatatacccagtaaggggatggctgggtcaaatggtatttccagttctagatccctgaggaattgccacactgacttccacaatggttgaactagtttacagtcccaccaacagtgtaaaagtgttcctatttctccacatcctctccagcacctgttgtttcctgattttttaatgattgccattgtaactggtgtgggatgatatctcattgtggttttgatttgcatttctctgatggccagtgatgatgagcattttttcatgtgtcttttggcgcataaatgtcttcttttgagaagtgtctgttcatgtccttcgcccactttttgatggggttgtttgttgttttcttgtaaatttgttatttgaatatatttccttttccaccatagacctcaaagcgttacaaatgtccacttgcagatcgtacaaagatagtttcaaaactacttcatcaaaagaaaggtttaactctgtcagatgaattctcacatcagaaagaattttctcagattgcttctgtctagattttatgtgaagatatttccttttctgccacaggccacaaagtgctccaaatgtccacttgcagattcaacaaaaagagtgtttccaaatgacccaaacaaaagaaagtttcaactctgtgagaggaatgcacacatcacaaagtagtttctcagaatttgtctttctagtttttatgagaagataattcctttttcaccataggtctcaaagccttccaaatgtacaaatgcagattcgacaaaaagagagtttgaaaactgctcaatcaaaagaaagggttaactctgtgagatgaatacacaaatcacaaagaagtttcacagattgcttctgtctagattttatgtgaagatatttccttttctaccatagactgtaaagtgctccaaatgttcacctgcagattctacaaaaagagtgtttccaaaatgctcaatccaaagaaaggttcaactctgtgagatgaacatacacatcacacagaagtttcccagaatgcttctatatagtttttatgtgaagatatttccttttctaccataggccactccgtgagatgaatgcacacatcacaaagaagtgtgtcagaatgcttctgtctagttattacgtaaagatacttccttttccaccagacaccaaaaagcgctccaaatgtccacttgcagattctacaaaaagagtgtttcaaagctgctcaatcaaaagaaagttcaactctgtgagatgaatgcacacatcaaaaagaagtttgtcagaatgcttctgtctggtttttatgtgaagatattaccctttccaccatgggcctcaaggcgctccaaatgtccacatccagattctacaaaaagagcttttgaaagctggtcaatcaaaagaaagtttcaactctgtgagatgaatgcacacatcacaaagaagtttgtcacaatgcttctgtctagtttttatgtgaagatttttccttttccaccattggtctcacagcactccaaatgtccacttgcagattctacaataacagtgtttcaaagctgctcaatgaaaagtaaggttcaactttgtgagatgaatgcacacatgatgaagacatttgtcaagatgtttctgtctagttctcatgtgaagatatttccttttccaccataggcttcaaatcactccaaacgtccacttgcaaatagtacaaaaagcgtctttcaaaactcctcaatcaaaagtaagattcaattctgtgagatgaatgcacacatcacaaagaagtttggtagaatgcttctgtctagtttttatgtgaagatatttccttttccaccataggcctcaaagtgttccaaatgaccacttgcagatcctacaaaaagagtgtttcaaagctgctcaatctaaagaaaggttcaactctgtgggatgaatgcacacatcacaaagaaatttctcaccatgcttgtgtctagttattaaaggaagatatttcgttatccaccataggaatcaagttgctccaaatgtctacttgcagattctacaaaaagagtgtttcaaaactgctcaatgaaaagtaagtttcaaccctgtgacatgaatgcacacatcagaaataagcttgtcggaatgcttctgagtagtttttatgtgaagatatttccttttccaccatatgcctcaaagcgccccaaatgaccacatgaagattctgcaaaaagggtttcaaaactgctcaacgtaaagtaaggttcaactctgtgagatgaatgcacaaatcacaaagaagtttgtcagaattcttctgtctagtttttacgttatttccttttccaccataggcctcaacgtgcgcaaaatgtccactcagattctacaaaaatggtgtttcaaagttgctcaatcaaaagaaatgttcaactctgtgagatgaatgtacccgtcacaaaggagtttgacagaatgcttctgcatagtttttatgtgaaggtattccttttccaccattggcctcaaagcactccacatgtccgcttgcagtttctacaaaaagagtgtttcaaaactgctcaatcaaaagaaaggtccaattctgtgagatgaatgcacacatcacaaaattttttcagaatgcttctgtctagtttttatgtgaagatatttcattttccaccataggcctcaaagcgctccaaatgtctacgtgcagatcctacaaaaagagtgtttcaaattggtcattcaaaactaattttcaactccataagatgaatgcacccattatgacgaagtttgtcagaatctttctctatagtttttatgtgaagatatttccttttccgccataggtctcaaagcactccaaaagtttacttgcagattctacaaaaacagtgtttttaagctgctcaaacaaaagaaaagttcaactccgtgagatgaatgcacacatcacaaagaagtttttcattatgcttatgtctagtttttatgtgaagatatttccttttccatcatagtcctcaaagtgctccaaatgtccagttgcagattttacaaaaagagtgtttcaaaactgctcaatcaaaagaaaatttcaactctgtgacatgaatgcacacatcacaaagaaatctctcagaatgcttctgtctaatttttaattgaagatatttatttttccaccataggcctcaaagcactcaaatgtccacttgctgattctacaaaaagagggtttccaaactactcaatcaaaagaaaggttcaactctgtgagataaatgcacacatcacaaagtaatttgtcagaatgcttctgtctagtttttatgtgaagatatttccttctccaccataggcctcaaagcactccaaatatccacttccagatagtacaaaaagggtgtttcaaaactgctcaatcaaaagcaatgttcaactctctgagatgaatgcacacatcacaaagaagtacctcagaaagcttctgtctagttttaatgtgaagatatttccttttccaacataggcctcttaggggccaaatgtccacgtggaaattctacaaagagtgtttcaaaactgctcaatcaaaagaaagattcaactctgtgagatgaatgatcacatcacaaagaattttctaagaatgatcctgtctagattttttgtgaagtttttaccttttcgacaataggcctcaaagcgctccaagtgtacacttgcagattctacaaaaagagtttttcaaaactgttcaatgcaaaggaagtttcaactccatgagatgaatgcacacatcacaaaggagtttgtcagaatgtttcagaatagtttttatgtgaagatatttccttttgcaccatcggttgcaaagccctccaaatgtccatttgcagattctacagagagtgtttcaaaactggtcaatcaaggccgggcacggtggctcacgcctgtaatcccagcactttgggaggccgaggcgggtggatcatgaggtcaggagatcgagaccatcctggctaaaacggtgaaaccccgtctctactaaaaatacaaaaaattagccgggcgcggtggcgggtgcctgtagtcccagctactcgggaggctgaggcaggagaatggcgtgaacctgggaagcggagcttgcggtgagccgagattgcgccactgcagtccgcagtctgacctgggcgacagagcgagactccgtctcaaaaaaaaaaaaaaaaaaaaaaaaaactggtcaatcaaaagaatggttcaactctgagatgaatgcacacatcacaaagaagtttgtcagaatgtttctgtctagttcctaagtgaagatacttccttttcgaccataggcctcatagcgctccaaatatccacttgcagattctacagagagttaccaaattactcaatcaaaagaaatgttcaactctgtgaaatgagtgcacacatctcaaagaaatttgttagaatgcttctgtctagtttttatgtgaagatatttccttatccaccataggcctcaaagcactccaaaagtccacttgcagatagcacaaaaattgtgtttcagaactggacagaaacactctgacaaacttctttgtgatgtgtgccttcatctcacggagttgaacatttctgttgattgagcagttttaaaacactatttttgtagattctataagtgtacaattggagcgctttgaggactatggtggaaaaggaaatatcttcacataaaaattagacagaagcattctgacaaactgccttgtgatgtgtgcattcatctcacagagttgaacatttcttttgattgaacagctttgaaacactctttttgtacaatctgcaagtggacatttggagcactttgagacccatggtggagaaggaaatatcttcacataaaaacgagaaaaaagaattctgagaaactcctttgtgttgagtgtgttaatctcacacagttgagcctttctttttattgagcagtttggaaacactcttttggtagaacctgcaagtggacatttggaacaatttcaggcatatggtgaaaaaggaaatatattcacataaaaactagacagaagcgttctgacaaacttctatgtgatatgtgtattcatctcaccgtggtgaaactttgttttgattgagcagctttgaaacactctttttgtagtatatgcaagtggacatttggagcgctttgaggcctatagtggataaccaaatatattcatataataactagacagaagcattttgagaaacttctttgtgatgtgtgaattcatctcacactgatttgaacctttcttttgattgatcatctttgaaacactctttttgtagaatcagcaagtggatatttggagcgctttgaggcctatggtggaaaaggaaatatctacacataaaaaccagacagaagcattctgacaaacttctttgtgatgtgtgcattcatctcacagaattgaaccttacttttcattgagcagttttgaaacactctttctgtagaatctgctagtgagcaattggaggactttgagtcctattgaggaaaaggaaatgtcttcatataaaaactagaaagaagcctgctgagaaacttctttgtgatgtgcgcattcatctcacagggttaaaccttgcttttcattgagaagctttgaaacactctttttgtagaatctacaagtggacatttggagcactatgaggcctatggtggaaaaggaaatatcttcacataaaaactagacagactattctcacaaacttctttgtgttgtgtgcattcatctcacagagttgaaccttacttttcattgagaagttttgaaacactctttttgtagtatctgcaagtggacatttggagcgctttgaggcctatggtggaaaagtaaatatcttcaggtaaaaagtagacagatgcattctgagaaactactttgtgatgtgtgcattcatctcacagagttgaacctttcttttgattgaacaactttgaaacactctttttgtagaatctgcaagtggacatttggagagctttgaggcctatggtggaaaaggaaaaatcttcacataaaaactagacagaagcattctgacaaacttctttgtgatgtgtgcactcatctcacagagttgaaccttatttttcattgagcagttttgaaatactctctttgtagaatctgcaagtggacatttcgtgcgctttgaggcctatggtggaaaaggaattatcttcacataaaaactagacagaagcattctgacaaccttctttgtgatatgtgcattcatctcacagagttgaaccttactttcgattgagcagttttgaaacactctctttgtagaatctgcaagtggacatttgctgcactttgaggcctatggtggataacaaaatatcttcatataataactagatggaagcattatgaaaaactcctttatgatgtgtgcttgcatcttacagagtggaacctttcttttgattgagcagctctgaaacactctttttgtagcatctgcaattggacatttggagtgcgttgaggcctttggtggaaaaggaaatatctgcacataaaaaccagaaagaagctttctgacaaactcctttgtgatgtgtgaattcatctcacagaattgaaccttacttttgattgagcagttttgaaacacccgttttgtagtatctacaagtggacatttggagtgctttgaggcctatggtggaaaaggaaatattttcacataagaattaggcagaaggattctgagaaattcctttttgatgtgtgcattcatctcacagagttgaaccttactttcgattaagcagttttgaaacactcttttttgtagaatctgcaagtggacatttgctgcactttgaggcctatggtggttaatgaaatatcttcatataataactagacagaagcattatgccaaacttctttatgatgtgtgcattcgtctcacagagtggaacctttcttttgattgagaagctcagacacactctttttgtagcatctgcaattggacatttggagcgctttgaggcctttggtggaaaaaggaaatatcttcacataaaaaccagaaagaagctttctgacaaacttctttgtgatgtgtgccttcagctcacagagttgaacctttcttttgattgagcaatttggaaaccctctttttgtagaatctgcaagtggacatttggagtgctttgaggcctatggtggaaaaggaaatatcttcacataagaactaggcagaaagattctgagaaattcctttgtgatgtgtgcattcatctcacagagttgaaccttactttcgattgagcagttttgaaacactcttttttgtagaatctgcaagtggacatttgctgcactttgaggcctatggtggttaatgaaatatcttcatataacaactagacagaagcattatgacaaacttctttgtgatgtgtgcattcgtctcacagagtggaaactttcttttgattgagcagctctgaaacactctttttgtataatctgcaattggatatttggagtgctttgaggcctttggtggaaaaggaaatatcatcacataaaaaccagacagaagcattctgacaaactcctttgtgatgcgtgcattcatctcatggaattgaaccttacttttcattgagcagttttgaagcactctttttgtagaatctacaagtggacatttggagcacttgagagctatggttgaaaaggagatatcttcacataaaaactagacagaagcattctgacaaacttctttgtaatgtgtgcattcacatcacagagttgaaccttaccttcaattgagctgtttcaaaacactctttttgtagaatctgcaagtggacatttgaagcacttgaggcctatgttggaaaaggaaatatctccacataaaaattagacaaaagcattctgacaaacttctttgtgatgtgtacattcatgtcacagagttgaaccttacttttgattgagcagttttgaagcacccttttggtaatatccacaagtggacatttggagtgctttgagacctttggtgcaaaaagaaatatcttcacataagaactaaacagaagcattctgacaaatttctctgcgatgggtgcattcatctcacagatttgaactttattttgattaagcagctttgaaacactgtttttgtaaaatctgcaagtggacattaggagcgctttgaggcctatgttggataacgaaatatcttgacgtaaaaactagatagacgcattctgacatacatctttgtgatgtgtgcattaatctctcagagttgaaacttaattttcattcagaagttttgaaatactctttttgtactatctgcaagtggacatttggagcgctttgaggcctatggtggaaaagtaaatatcttcacataaaaactagacagaagcattctgacaaacttctttgtgatgtgtgcatttatctcacagagttgaaccttacctttcattcagcagttctgaaacactctttttgttgaatctgcatttggacatttggagaactttgaggccaatggtggaaaaggaaatatcttcacataaaaactagacagaagcattgtgacaaccttctttgtgacatgcgcattcatctcacagagttgaaccttacttttgattgagcagttttgaaacaccctttttgtaatgtctgcaactggacatttggagtgctttgaggcctatggtggaaaaggaaatatcttcacataaaaaccagacagaagcattctcacaaacttctttgtgatgtgtgcatttatctcgcagagctggaccattcttttgattgagcagctttgaaacactctttttgtagaatctgcaattggacatttggatcactttgaggcctatggtggaaaaggaaatatcttcagataaaaactagacagaagcattttgaaaaacttctttgtgacgtttgcattcatctcactgacttgaacctttcttttgattgagcagttttgaaaaagtattttatagaatctgcatgtggacatttggagcgctttgaggcctatggtagaaaagaaaatatcttcacatgaaaactacacagaagaattctgacaaacttctttgtgatgtgtgcattcatctcacagagttgaacctttcttttgattgagcagctttgaaacaccctatttgtaaaatctgcaagtgaacatttggtgcgctttgaggtctctggtggaaaagaaaatatcttcacatacaaactagacagaagcattctgacaaactactttgtgatttgtgcattcatctcacagagttgaacctttcttttgattcagcgggtttgaaacaccctttttgtagaatctgcaagtgaacatttggagcactttgaggctgatggtggaaaaggaaatatcttcacataaaaactaaacagacgtattctgacaaccttctttgtgatgtgtacattcatctcacagagttgaaacttacttttgattgagcagttttgaaacatcctttttgtgctatctgcaagtggacatttggagtgctttgagtcctatggtggaaaaggaaatatcttcacataagaactagacagaagcattctgagaaatttctttgtgatgtgtgcaatcatctcacacagttgaaccttacttttgattgtccagttttgaaaaactctttttgtagaatctgaaagtggacatttggagagctttgaggcctatgatggataacgaaatatcttcatataataaatagagagaaacattatgttaaactttttgtgatgtctgcatacatctcacaaagaattgaaactttcttttgattgagcagctttgcaacattctttttgtggaatctgcaagtggacatttggagtgctttgagacctatggtggataacgaaatatgttcacataaaaattggacagaagcattctgagaaacttctttgtgatgtgtgcattcatctcacagagttgaacctcccttttgattgagcactttggaagcactctttctgtaaaatctgcaagtggacaattggagtgctttgaggcctatggtggaaaaggaaatatcttcacataagaactagacagaaacattctgagaaatttctttgtgatgtgtgcaatcatctcacagagttgaaccttacttttgattgtctagttttgaaaaactctttttgtagaatctgaaagtggacatttggagcgctttgagtcctatgatggataacgaaatatcttcatataataaatagagagaagcattatgataaactttttgtgatgtctgcatacatctcacaaggagttgaaactttcttttgattgagaagctttgcaacattctttttgtagaatctgcaagtggacatttggagtgctttgaggcctatggtggataacgaaatatgttcacataaaaattggacagaagcattctgagaaacttctttgtgatgtgcgcattcatctcacagagttgaacctcccttttgattgagcactttggaagcactctttctgtaaaatctgcaagtggacaattggagtgctttgaggtctatggtggaaaacgaaatatcttcacataaaaattggacagaagcattctgagaaacttctttgtgacgtgtgcattcatctcacagagttgaacctcccttttgattgagcactttcgaagcactctttctgtaaaatctgcaagtggacaattggagtgctttgaggcctatggtggaaaaggaaatatcttcacttaaaaactagacagaagcattctgacaaacttctctgtgatgtgtgcattcatctcacaaagaattgaaactttctttgattcaggagctttgaaacactctttttgtagaatctgcaagtgtacatttggagcgctttgaggcctatggtggaaaaggggacatcttcacatatagaacagacagaagcattctgacaaacttcttttcgatgtgtgcgttcaactcacagatttgaaccttacttttcattgagcagatatgaaacactccttttgtagaatctgcaagtggacaattggaccgctttgtggcctatggtggaaaaggatatatcgtcacataaaaactagacagaaatcttctgacaaacttctttgttatgtgtgcattcatctttcagagttgaacctttcttttgattgagcaactttgaaacactgtttttgtagaatctgcaagtagtcatttggagcgctttggggcctatggcaaaaaaggaaatatcttcacataaaaactagacagaagcattctgacaaacttctttgcgatgtgtgtattcatctcacagagttgaaccttacttttcattgagcaattttgaaacactctttttggagaatctgtaagtggacattttgagggctttgacgcacatggtggaaaaggaaataccttcacataaaaattggacagaagcattctgacaaactactttgtaatgtgtgcattcatctctcagagctggacctttcttttgattgaacagctttgaaacactctttttgtagaatctgcaagtggacatttggagcgctttgaggcctatggtggaaaaggaaatatcttcacagaaaaactagacagaagcattctgacaaacttctttgttatgtgtgcattcatctcacaaagaattgaaactttctttgattcaggagctttgaaacactctttttgtagaatctgcaagtgtacatttggagcgctttgaggcctatggtggaaaagggaacatcttcacatatagaacagacagaagcattctgacaaacttcttttcgatgtgtgcgttcaactcacagatttgaaccttacttttcattgagcagatatgaaacactctttttgtagaatctgcaagtggacaattggaccgctttgtggcctatggtggaaaaggatatatcgtcacataaaaactagacagaaatcttctgacaaacttctttgttatgtgtgcattcatctttcagagttgaacctttcttttgattgagcaactttgaaacactgtttttgtagaatctgcaagtagtcatttggagcgctttggggcctatggcaaaaaaggaaatatcttcacataaaaactagacagaagcattctgacaaacttctttgcgatgtgtgcattcatctcacagagttgaaccttacttttcattgagcaattttgaaacactctttttggagaatctgtaagtggacattttgagggctttgacgcacatggtggaaaaggaaataccttcacataaaaacgagacagaagcattctgacaaactactttgtaaagtgtgcattcatctctcagagctggacctttcttttgattgaacagctttgaaacactctttttgtagaatctgcaagtggacatttggagcgctttgaggcctatggtggaaaaggaaatatcttcacagaaaaactagacagaagtattttgaaaaacttcattgtgacgtttgcattcatctcactgatgtgaacctttcttttgattgagcagttttgaaaaactctttttgtaggatctgcatgtggacatttggatcgctttgaggcctatggaggaaaagaaaatatcttcacctaaaaaccatacagaagtattctgagaaacttctttgtgatgtgtgcattcatctcacagagttgaaccttacttttcattgagcaattttgaaacactctttttggagaatctgcaagtggacatttggagggctttgacgcacgtggtggaaaaggaaatatcttcacataaaaactagacagaagcattctgacaaccttcattgtgatatgtgcattcatctaagagagttgaaccttacttttgattcagcagttttgaaactctctttttgtagaatctgcaagtggacatttggagcacttttagacctatggtggaaaaggaaatatcttcacataaaaactagacagaacaattctgagaaacttctttgggatgtgtgcattcatctcacagagtaaaacattcttttgatccagcagttttgtaagtatctttttgtagaatctgcaagtggacattttgagccctttcaggcctatggtggaaacggaaatatctacaaattgaaactcggcagaagaattctgagaaactcctttgtgatgcttgcattcatgtaacagagttgaacctttctttatgattgatcagtttggaaaccctcttttttagaatctgccagcggatatttggagcgttttgcagcctatggtggaaaaggaaatatcttcacatgaaaactaaatagatgtattctgagaaacttctatgtgatgtgtgcgttcatctcacagagttgaacctttcttttgattgagcagtttggaaacactctttttgtagaatctgcaagtggacgtatggaatgctttgaagcctatggtagaacaggaaatatcttcacataaaatctgaacagaggaattctgagagactcctttgtgatgtttgtattcatcttacagaattaaagcttccttttgaatgagcagatttgaaactgtctttttgtagaatctgcaagtggacattttgagcgcctggaggcctatggtggaaaagaaaatggcttcacatgaaaactagacagaagaattctgagaaacttctttcttatgtgtgcgttaatctcacacagttgaacctttcttttgattgagcagtttcaaacactctttttgtagaatctgcaagtggacttttggagcactttgtggcctacggtagaaaaggaaatatcatcacataaaatctagacagaagcaatctgagacttctttgtgatgtgtgcattcaccacacattgtgtaacctttcccttgattgagcagttttgaaactctttttgtagaatctacaagtctacatttggagtgctttgagacctatggtagaaaaggaaatatcttcacataaaaactagtcaaaagaattctgagaaacttcttgttgatgtgtgtgttcacctcacagagttgaaccgttgttttgattgagcagtttggaaaccctctttttgtagaatctgcatgtggacatttggagcgctttgaggcctatggtggaaaaggaagtatcttcacataaaaactagacagaagaattctgagaaacttctttgtgatgtctgcatttatctcacagacttgaacctttcttttgattgagcagtttggaaacactctttttgtagaatctgcaaggggacatttggagcggtttacaccctatgatagaaaaggaaatatcttcacatagaatatagacagaagcaatctgagaaacttatttctgatgtgtgaattcatctcacagagttaaacatttcttttgattgagcagtttggaaacaatctttttgaagaatctgcaagtgaacatttggagagctttgtggcatatgatagtaaaggaaatatcttcaaataaaatttagaggaagaaatctgagaaattgcttttgatgtgtgcattcatgtcacagaattaaagctttcttttgattaagcagttttgaaactctctttttgtagaatctgcaagtggacatttggaaatctttgaggcctgtgttagaaaaaggaaatatcatcacataaaaactagatagaagcaatctgagaaactttggtgtgacatgtgaattcatctcccagagttgaaacattcttttgatggaacagtgttgatatactcttttggtagaatctgcaagtggacatttcaaattcattgagtcttatggtggaaaaggaaatatctttacataaaaactagacagaaaaatcctgggaaacttctttgtgatgtgtgcattcatctcacagagttgaacctttcttttgaatgagcagtttggaaactctctttttgcagaatcttcaagtggacatttggagcgctttgaagcctatggtagaaaaggaaatatcttcacataaaatctacacagaagcaatctgagaaacttctttgtgatgtgtgcattcatcacaccgtgttaaacctttctcttgactgaggagttttgaaacttactttttgtagtatctgcaagtggtcatttggagcgctttgaggactatggtggaaaaggaaatatcttcacataaaaaccagacagaataattctgagaaacttctttgtgatgagtgagttcatctcacagagttgaacctttctttgattgagcagtttggaagcactctttttgtacaatctgcaggtggatatttggagcgctatgctgcctatggtagaaaacgaaatatcttcacataaaatcaggacagaagcaatctgagaaacatccgtttgatgtgtgcgttaatctcacagagttaaatctttcttttgattgagcagttttgaaactctctttttgtagaatctgcaagtggacatttggagcgcttttagaactatggtggaaaaggaaatatcttcacaaaaatctggacagaagacttctgagaaacttctttgtgatgtgtgtattcatctcacggagttgaacctttcttttgattgaacagttttgaaatgctctttttgtagaatcttcaagtcagcatttggagtgctttgaggaccatagtggaaaaggaactatcttcacatagaaactagacagaagaatgctgacagacatctttttgacgttcgttaatctcacaaggttgagcctttcttttgattgaacaatttggaaaatctctttttgttgaatctgcatgtggacatttggagcgctttgaggcctatggtggaaaaggaagtatcttcacataaaactagacagaagaattctgagaaacttctttgtgatgtgtgcgtttatctcacagacttgaacctttcttttgattgagcagtttggaaacactctttttgtagaatctgcaaggggacgtttggagcggtttgcgccctatgatagaaaaggaaatatcctcacataaaatatagacagaagcaatctgagaaacttgtttctcatgtttgcattcatccacagagttaaacgtttcttttgatagagtagttttgaaacactctttttgtagaatctgcaagtggacatttttaatgcagacatcacaaagtagtttctcagattgcttctgtctagattgtatgtgaagatatttctttttctaccatagactccaaagcgatccaaatgtccacttgcagattctacaaaaagagtgtttccaaactgttcaaccaaaagaaagttcaactctgtgagatgaatgcacgcatcacaaaaaagtttctcagagttcttctgtctagtttttatgtgaagataatttattttccaatataggcctcaaggtgttcgaaatgtccacttgcaggttctacaaaagaatatttcaaaactggtccatcaaaagaaaggtttaactctgtgagatgaatgcaaacatcacaaagaagtttctcagattgcttcagtctagatgtcatgtgaagatatttccttttctaccatagcctgcaaaacgctccaaatgtccactttcagattctacaaaaagagagtttcaaaactgctccatcaaaataaaggtccaactctgtcagatgaatgcacacatcacaaagaagtttctcttcttgcttctgtctagattgtatgtgaagatatttctttttccaccatacacctcaaagcactccaaatgtccacttgaagattctataaaaagagagtttcaaagctcttcaatcagaagaaaggttcaactctgtgagatgaatgcacacttcacaaagaagtttctcagatttcttctgtatagattttatgttatgatatttctttttctaccataggcctcaaagcgctccaaatgtccacttgcagattctacaaaaagagagtttcaaaacttctgaattaaaagaaaggtttaactctgtgagatgaatgaacacatcactaggatgttgctcagattgcttctgtctagatattatgtgaagatatttccttttctatcataggccgcaaagcgctccaaatgtccacttgcagattctacaaaaagaatgtttccaagctcctcattcaaaagaaagattgaactctgtcagatgaacgcacacatcacaaagaagtttctcagaattcttttgtctagtttttatgtgaagatatttcctttcccaccatagtcctcaaagtgctccaaatgtccacttgcagattctacagagagtttcaaagctccttcatcaaaaaaaaaaatgttaacctctttctgatgaatgcacacatcacaaagaagtttctcaaattgcttctgtctagattttgtctgaagatatttccttttctgccacagactgcaaagcactccaaatatccattttcagattctacaaaaagactctttccaaactcttcaatcaaaagaaaggttcaactctgtaagatgaacgcagacatcacaaagatgtttcccagaattcttctgtctagtttttatgtgaagatatttcattttccaccagaggcctcaaggtgctcaaattgtccacttgcagattctacaaaaagagagtttcaaaactgctcaatcaaaagaaagctttaactctgtgagatgaatgcacacatcacaaagaagtttctcagattgcttctgtctacaatttatgtgaagatatttccttttatgctataggccccaaagcgctccaaatgtccacttgcagattctacaaaaagagagtttccaaactgctcaatctaaaggaaggttcaactctgtgagaacaatgcacgcatcacaaagaagtttctcagaattcttctgtctagtttttatgtgaagatacgttattttccaccataggccacaaagcactctacatatccacttgaagattctacaaaaagagagtttcaaatctgctccatcaaaggaaaacttcaaccctctgagatgaatgcaccaatcacaaagaagtttatcagattacttctgtttatattttatatgaagatatttccttttccaatataggcctcaaagtgctccaaatatccacttgtaggttttacaaaaagagagtttcaaaactgttaaatcaaaacaaagctttaactctgtgagatgaatgcacacatcacaaagaagtttctcagattgcttctgtccagattttatgtgaagatatttccttttctaccataggccgcaaaacgctctaaatgtccacttgcagattctacaaaaagagtgtttccaaactgctcaatcaaaagaaagattcaactctgttagatgaatgcacacatcgccaagtcgtttctcagaattcttctgcctagtttttatttgaagatatttgctttccaaccatagtcctcaaagcgctccaaatgtgcacttgcagattctacaaacagagagtttcaaaactcgtgcatcaaaaaaagtttacctctttcagatgaatgaacacatcacaaagaagtttctcagattgcttttgtctagattttgtctgaagatatttccttttctgccataggccacaaagcgctccaaatatccacttgcagatcctacaaaaagagtgtttctgaactcctcaatcaaaagaaagtttcaactctgtgagatgaatgcacacatcacaaggaagtttctcagagttcttctgatttgtttttatatgaagatatttccttttctgtcataggcctttaagcgttccaaatatccacttgaagattctacagaaagagagtttccaaagggctcaatcaaaagaaagttttaactctgtgagatgaatgcacacatcacaaagaagttaatcagattgcttctgtctagattttatgtgaggatatttctttttccagcctaggccgcacagcactccaaatgtcctcctgaagattctactacaaaagtttttccaaactgctcaataaaaagaaaggttcaactctgtgagatgaatgcacacatcacaaagtagtttctcagaatgcttctgtctagtttttatgcgaagatatttccttttccaccgtaggcctcaaaacgccccaaatgtccacgtgcaggttctacaaaaagagagcttcaaaactgctcaatcaaagaagttttaactctgtgagatgaatgcacacatcacaaagaagtttctcatattgcttctgtctacaatttatgtgaagatatttccttttataccataggccccaaagcgctccaaatgtccacttgcagattctacaaaaggagtgtttccaaacttctcaatcaaaagaaggttcaaatctgtgagaagaacacaggcatcataaagaagtttctcagaattcttctgtctagtttttatgtgaagatacattattttccaccataggccacaaagcactctaaatgtccacttgcagattctacaaaaagagagtttcaaatctggtccatcaaaagaaaacttcaaccctgtgagatgaacgcacatatcacaaagaagtttatcaggttgcttctgtctagattttatgtgaagatatttccttttataccatagattgcaaagcactccaaatgtccacttgaagattctacaaaaagaatgtttccaaactgctcaatcaaaagaaatgttcagctctatgagatgaacacagacatcacaaagaagtttctcagaattcttctatctagtttttatgtgaagatatttccttttccccataggtctaaaatctctccaaatatccacttgcagattctacaaaaagagagtttcaaaactactgaatcaaaagaaaggtttaactgtgtgggatgaatgcacacatcacaaagaactttctcagattgcctctatctagattttaatgtgaatatctttccttttctaccataggcctcaaagcgctccaaaagtccacttgcagattctacaaaaagagtgtttccaaacagctcaatcaaaagaaatttttgactctgtgagatgaacgctctcatcacaaagatgtttctcagaattcttctgtctagtttttatatgaagatacttccttttccacgatgggcctcaatatgatccaaatatccacttgcagattctacaaaaggagtgtttcaaaactcctcaatcaaaagaaagatttaactctgtgagatgaatgcaacatcacaaagaagtttctcagattgcttctgtctggattttatgtgaagatatttccttttccaccataggcctttaagagctccaaatgtccacttccagattctacgtaaagagagtagcaaaattgctcaatcaagagaaagttttaactctgtgagataaatgcacacatcataaaaaaatttctcagtttgcttctgtctatattttatgtgagggtattccgttttctaccataggctgcaaagctccccaaatatccacttacagattctaccaaaagagagtttcaaaactactctgtcaaaagataggttcaaatccgtgagttgaatgcacacataacaaggaagtttcccagaatgcttctgtgtagtttttatccgaagatatttccttttccaaaatagaccacaaagcccttcacatattcacttccagattctacaaaaaaagtgtttcaaaactactcagtcaatagaaaggttcaactctgtgtggtgaatgcatttttctcaaagaagtttcccagaatgcttctgtgtagtttttatttgaagatatttcattttccatcatagggcacaaaatgctccaagtatccacttgcagattctacagaaagagagatttaaaaatgctgaatcaaaagatagggtcaacactgtgagttgaatgcacacataacaagaagtttcacagaatgcttctgtgcagtatttatgtgaagatatttcctttttcaaaataggcctcaaatcgctccaaatatccacttgcagattctacaaaaagagtgtttccaaacagctcaatcaaaagaatggttaaattctgtgagacaaatgcacacatcacaaggatgtttctcagaatgcttctgtgtagtttcagtttgaagatatttccttttccattataggccacaaagggctccaaatatcgacttgcagattctacaaaagagagattcaaatctgcccagtccaaagatagattcaactctctgagttgaatgcacatatcacaaagaagtttctcagaatgcttctgtgtagttttcatgtgaagatatttcgttttccacaatgggcctcaaagctctccaaatatcaacttgcagatactgcaaaaagagtgtttcaaaactgttcaatcaaaggaaggtttcaactctgtgtgatgaatgcactcatcacaaagaagtttctctgaatgcttctgtgtagtatttatttgaagatatatccttttccaccaaagagcacaaagggctccaaatatccacttgcagattctacaaaaagagagattcaaaacggctcaatcaaaagataggttcaactctctgagttgaatgcacacatcacaaagaagtttctcagaatgcttctgtgtagtttttatttgaagatatttccttttccacaataggcctgaaatcactccaaatatccacttgcagattctacaaaaagagtgtttcaaaactactcaatcaaaagaaaggttcaactctgtgaggtgaacgcacacatcacaaagaagtttctcagaatgtttttgtgtagtttttaggttaagatatgtgcttttccaaagtaggcctcaaagcgctcataatatccacttgccgattatacagaaagagtgtttcaaaactgctctatcataagataggttgaaccctctgagatgaatgcacagatcacaaagacttttttcagaattcttctgtgtagtttttatttgaagatatttccctttccaccataggacgcaaatggttccaaatatccacttgcagattctacaaaaagagaaatagaaatctgttcaattataagataggttcaaccttgtgagatgaatgcacacatcacaaagatgtttctcagaatgcttctgtgtaatttttatgtgaagatacttccttttccacaatagagtgtttcaaaacttcccaatcaaaagaaaggttcaaccctgtcagatgaatgctcacatcacaatcaagtttctcagaatgcttctgtgtagtttttatttgaagatattttcttttccaccataggccacaaagggctccaaatatccacttgcagattgtacaaaaagagagattcaaaactgcccaatcaaaagataggttcaactctgttagttgaatgcacgcatcacagaaaagtttcccaaaatgcttctgtgaaatttttatgtgaaaatatttctttttccacaatgggcctcaaagctctccaaatatcaacttgcagatactgcaaaaagtgtgtttcaaaactgctcaatcagaggaggatttcaactctgtgtgatgaatgcactcatcacaaagaagtttctctgaatgcttctgtgtaatttttatttgaagatatttatttttccaccatagagcgcaaagggctccaaatatccacttgcagattctacaaaaagatagtttaaaaacgggtcaatcaaaagataggttcaactctgtgagttgaagacacccatcaaaaagaagtttctcagaatgcttctgtgtaggttttatgtgaagatatctccttttctacagtaggcctcaaatcgatccaaatatccacttgtagattctacaaaaacagtttcaaaactgctcaatcaaaagataggttcaattctgtgagctgaatgcactcaccacagacatgtttctcagaatgcttctgtgtagtttttatgtgaagatatttccttttccacaataggcttcaaagctctccaaatatccacttgccgattctgcaaaaagagagattcaaaactgctcaatcaagacataggttcaactctgtgagttgaatgcacatctccaaagaagtttctcagaattcttctgtgtagtttttatttgaagatatttgcttttccacagtaggcctcaaagcgctacaaatatccacttgaagtttctgcaaaaagagagattcaaaactgctcaatcaaaagatagattcaactctgtgtgttgaattcacacataacaaaggagtttctcagaatgcttctgtgtagtttttatgttaagatatacccttttccaaaataggcctcaaagccctccaaatatccacttccagattctacaaaaagagtgtttcaaatttgctcaatgaaaagaaacattcaacactgtgtgatgaatgcactcctcacaaagaagtttctctgaatgcttctgtgtagtttttatttgaagatatttccttttcaactttagggcacaaagagctcccaatatccacttgcagattctacaaaaagagagattggaaactgctcaatcagaagatacgttcaaccctgtgagatgaatgcacacatcacagagaagtttcccagaatgcttctgtgtatgtagtttttatttgaagatatttccttttccaccatatgctgcaaagggctctaaatattcaataacaaagtctacaaaagagagattccaaactgctcaatcaaaagatctgttcaactctttaagtttaatgcatatataacaaagaagtttctcagaatgtttctgttcagtttttatgtgaagatatttctttttccaccataggcctcaaagccctccaaatatccaattccagattctacaaaaagagtgttgcaaaattgatcaatcaaaggaagggttcaactctctgagatgaatgcactcatcacaaagaagtttctcagaatgctactgtgctctttttatttaaagatatttccttttccaccatagggtgcaaagggctccaaatatctacttacggattctacaaaaagagagattgaaaacttctcaatcaaaaaataagttcaaatctgtgagttgaatgaacacataacaaagaagtttgtcagaatgcttctgtgtagtttttatgtgaagatatttccttttccaaaataggcctcaaagctcttgaaatatacacttccagattccacaaaaagagtgtttcaaaattgctcaatcaaaggaaaggttcaactctgtgtgatgaatgcactcatcacaaagaagtttctctgaatacttctgtgtagtttttatttgaagatatttcattttccacaatagggcgcaaagggctccaaatatggacttgaagattctacaaaaagagagattcaaagttgctcaatcaaaagaaaggttcaactctgtgagttgaatgcacacatcacaaagaagtttctcagaatgcttctgcgtagtttttaagtgaagatacttccttttccacaataggcctcaaaccgctccaggtatccctttgcagatactacaaaaagagtgtttcaaaactgctcaatcaaaagaaagtttcaactttgtgagatgaatgaacacatcacaaagaggtttctcagcatgcttctgtgtagtttttatgtgaacatatttgcttttccacaataggcctcaaagctctccaaatatccacttgcagattctgcaaaaagagagattcaaaagtgctcaataaggcggtagtttcgactctgtgagttgaatgcacatctccaaaaaagtttctcagaattcttctgtgtagtttttatttgaagtatttgcttttccaccataggccccaaatcgctacaaatatccacttgaagattctgcaaaaagagagaatcaaaactgctcaatcaaaagataggttcaactctggatgttgaatgcacacataacaaaggagtttctcagaatgcttctgtgtagtttttatgttaagatatactcttttccaaaataggcctcatagccctccaaatatccacttccagattctacaaagagtgtttcaaaactgctcaatgaaaagtaacgttcaacactgtgtgatgaatgcactcctctcaaagaagtttctctgaatgcttctgtgtagtttttacttgaagatatttccttttcaacaatagggcacaaagggctgcaaatatccacttgcagattctacaaaaagagagattggaaactgctcaatcataagaggcgttcaattctgtgagatgaatgcacacatcacagagaagtttcccagaatgcttctgtgtagtttttaagtgaagatacttccttttccacaataggcctcaaatcgctccaaatatccacttgcagattctacaaaaagtgtgtttcaaaactcctcaatcaaaagaaagtttcaactctttgagatgaatgaacacatcacaaagaagtttctcagaatgcttctgttttgttcttatttgaagatatttccttttcagcaataggcctcaaaactctccacatatccacttgcagattctgcaaaaagggagattcagagctgctcattcaaaaggtaggttcaactctgtgttttgaatacacacctcacaacgaagtttctcagaatgcttctgtgtagtttctatgtgaagatatttccttttctacaataggcctcaaagctctccaaatagcaactttcagattctgcaaaaagagagattcaaaactgcccaattagcagataggttcaactctgtgagttgaatacacacatcacaaagaagtttctcagaatgcttctgtgtagtttttatttgaagttatttccttttccaccataggccacaaagggatcaaaacatccaaatgcagattctaaaaaaaggagattcaaaactgctcaatcaaaagaaacgttcaactctgtgacatgaatgtacacaccacaaaaaagtttctcagaatatttctgtgtagtttttatgtgaagatatttgcttttccacggtaggcctcaaagcgctccaaatatgtacttgcagattctataaaaggagtgtttcaaaactgctgaataaaaagaaaggatcaactctgtgaaatgaatggacacatcacaaagaagtttctcagaatgcttctgtgtagcttttatttgaaggtatttccttttccaccataggccgcaaagggatcgaaatatccaattgcagattctaaaaaaaggagattcaaaactgcccatttctgtgtagtctttatgtgaagatatttgcttttccatgttaggcctcaaagcgatccaaatatctacttgcagatcctgtaaagtgagtgtttcaaaactgctgaataaaaagaaaggatcaactctgtgaaatgaatggacacatcacaaagaagtttctcagaatgcttctgtgtagtttttatttgaaggtatttccttttccaccataggccacaaagggattgaaatatccaattgcagattctaaaaaaaggagattcaaaactgctcaatcaaaataaacgttcaactctgtgacatgaatgtgcacaccaccaaaaagtttctcagaatgtttctgtgtagtttttatgtgaagatatttgcttttccacggtaggcctcaaagtgctccaattatgtacttgcagattctataaaaggattgtttcaaaactgctgaataaaaagaaaggatcaattctgtgaaatgaatggacacatcacaaagaagtttctcagaatgcttctgtgtagtttttatttgaaggtatttccttttccaccataggccgcaaagggctccaaatatccaattgcagattccaaaaaaaaggagattcaatactgctcaatcaaaagaaaggttcaactctgtgaattgaatgcacacatcacaaagaagtttatcagaatgcttctgtgtagcttttatgttaagatatttccttttccacaatagggctgatatcgctccaaatatccacttgcagactctacaaaaacagtgtttcataactgctccatcaaaataaagaatcaactctgtgaggtgaatgcacacatcacaaagaagtttctctgaatgcttctgtgtagtgtttatgtgaacatatttgcttttccacaataggccccaaagtgctccaaatatccacatgctgatttctacaaaaagagtgtttcaaaactgctcaatcataaggtaggttcgtcctgtgagatgaatgcacacatcaaaacgaagtttctcagaatgcttctgtgtagtttttatttgaacatatttccttttccaccataggccacaaagggctccaaatatccactcacagattctacaaaaaaagagattcaaaactgtttaatcaaaagctaggttcaactctgtcagttgaatgcacacatcacaaagaagtttctcagaatgcttctgtgtagtttttacatgaagatatttccttttccccaataggcctcaaagctctccaaatatccacttgcagattctgcaaaaagagattcaaaactgctccatcaaaagagaggttcgactgtcagtggaatgcacacatcacaaagtagtttctcagaacgcttctgtgtagtttgtatgtgaagatatttccttttcaaccataaagcacaaagggctccaaatatcaagttgcagattgtaccaaaagagagtttaaaaacggctcaatcaaaacataggttcaactctgtgagttgaatgcacacgtcacaaatagtttctcagaatgattttgtgtagtttttaggtgaagatatttgcgattccacagtaggcctcaaagcgctccaaatatccatttgctcattaaacaaaaagagtgtatcaaaactgctcaatcataagataggttcaaccctgtgagatgaatgcacacatcacaaataactttctcagaatgcttctgtgtagtttttatgtgaagatatttccttttccaccgtaggccacaaagggctccaaatatcaacttgaagattctacaaaaagagagattcaaaactgctccatcaagagataagttcaactctgtgagttgaatggacacatcgcaaagaattttctcataatgcttctgtgtagtttttatttgaagatacttccttttccacaataggcctcaaagctctccaactatccccttgcagattctacaaaaagagagattcaaaactgctcaatcaatagagtggtttgactctgtgcgttgaatgcacacctcacagagaagtttctcagaatgcttctgtgtagtttgtatttgaagatatttgcttttccacagtaggcctgaaagctctccaaatatccacttgcagattctgccaaaagagagattcaaaactgctcaatccaaagataggttcaactctttgagttgaatgcacacatcacaaagaagtttttcagaatgcttctgtgtagttattatctgaagatatttccttttccacagaagacctcagaggtctttaatatctacttgcagattctgcaaaaagagtgattcaaaacagctcaatcaaaagatattttcgactctgtgagttgaatgcacacctaacaaaaaagattctcacaatgcttctgtgtaatttttaggtgtagatgtttgctttccctcattaggcctcaaaaagttccaaatatccacttgcagattctgcaaaaagagagattcaaaactgctcattcaagagataggttcaaatctgtgagttgactgcacacctcacaaagaagtttctcagaatgcttctgggtagtggagtggagaaaagtggagtggattggagtggtaaggattggaatgcaatggagtggagtggaatggaatggaatggaacagaatggaatggaatggagtggaacagagtggagtagaggggagtggaatggagttgagtggagtgtatcagagtgcagtggaatggaaaggaatggaatggattggaatggattggagtggagtggagtggaatggagtgaaatagagtggagtggaatgaagtggaatggaatggaatggagttgaatgtaacggaatggagcagaaaggaatggaacggaacttaaaggaatctagtggagtggagtggagtggagttgatcagagtgcagtggaattgaatggaatggactggaatggaatagagtggagtggaggggagtggtaagaagttgaatagagtggaatgaaatagagtggagtggaatggtatggaatggaatggaatggaatggaatggaatggaatggaatggaaaggaatggaaaggaagagaatggaatggaattgaaaggagcagagtggagtggaatggagttgattggaggggatcggagtggaggggaatggaatggaatgaagtggagtggagtggagttgaatggaatggagtggagtgaaacggaatggaatggaatggaatggaacagaatggagtggagtggagtggagtgcagtggagttgagtggagtggttcggagtgcaggggaatggaaatgaatggaatggaatggaatgaaacaggatggaatgcaacgaagaaatgaaatgtgagctaagattgtgtcactgcactccagtctgggtgacagaggtagaccagtcgaaataaaggaatggaatggaatggagtagaatggaatggaatggagtggagtggaatggatggaatggagtggagtggattggagtggagtggaatggagagtagtggagtgtggtggaatgagtggagcagaatggaatggagtggaattgagtggaatggaatggagtggaatggaatggaatggaatggagtggaatggaatggaatgcattggagttgaatggaatggaatggaatggaatggaggggaatataatggaatgtagtgcaatgaaatgtactggagtggagtgcagtggagtggagtggaatatagtgaaatggagtggagtggaacggagtggagtggaatggaatggaatgaaatggaacggaacagaacggaagagaatggaatggaaggggacagagtggagcggaatggagttgagtggaggggatcggagtgcagtagaatggaattgaatggaatggaatggagtggagtggagtggaatggaatggagtggagtggaattgaatggaaaggaaagaaatggaatggaatggaacggaatagaatggaacggaacagaacagagtggagtggagtggagtttagtggagtggatcggagtgcaggggaatggaatggaatggaatggaatggaatggaatggaatgaaatggaatggaatgcaactatgaaataaaatgtgagctaagattgtgccactgcactccagtgtgggtgacagagttagatccagtcgaaacaaaggaatggaatggaatggagtagaatggaatggaatggagttgagtggaatggaatggaatggaatggagtggagtggagtggaatggaggggagtggagtgtagtggaatgagtggagcggaattgagcggaatggaatggagttaaattgagtggaatggaatggaatggaatggagtggaatggaatggaatggagtggaatgtaatggaatggagtgcaataaaatgtagtgtagtgtagtgtagtgtagtgtagtggaatggagtggaatggaatgcagtgcagtgggatggaatggaacggaatggaagacaatgaagtgcagtggattgtaatggaatggagtggaatagaatggagtggagtggtgtggagtggaatggagtggagtggaatggagtggaaaggaatggagtggagtggaaaggaatggaatggaatggaatgaaatggaaaggaatggaagggaatgaaatggaatggaacagaatagattggagtggaatcgagtggagtggagtagggtggagcggatcggaatgcagtggaatgaaatggaatggaatggaatggaatggaatgaaatagaatggaatttaggggagtggcgtggggtggattgagtggagttgagtgcagtagtgtggaatggagtggaatggaatgtagtggagtggaatggaatggaaaggaacagaaaggaatggaatggaatggaatggaatggaatggaatggaacagagtggagtctaatggagtgaaatggagtggagtggagtggagcggaatgaaatggagtggaatggaacagaatggaactgaccagaacggaatggaatcgaatggagtggagtggagttgagtggagtggatcggagtgcagtggaatgaaatggaatggaatggaatggaatgtattggagtggattcgagtggagtggagtgtagttgaatggagtggaatgaaatgcagtggagtggaatggaatggaatggagtggaatggaatagaatagaacggaatggaatggaatgaaaaggaatggagtggagtggagttgactggaatggattggattgccatggaaaggaaaggaaaggaatggaatggaatggaatggaatggaatagaatggaatggaaaggagtgtattggaatggagtggagtggagttgactggaatggattggattgccatggaaaggaaaggaatggaatggaatggaatggaatggaatggaatggaatggaaaggagtgtagtggaatggagtggagtggagtgcagtggattggagtggaatggagtggagtggagtgcagtggagtggaaaggagtggagtggtgtggaatggaatggagtggaatggaacggaaccaaactgaacagagtggaaaggaatggaacggagtggagttgagtggagtagagttgagtggaatggatgggaatgctttggaatggaatggaaaataatttaatgaaatttagttgagtggagtggattttattggagtggagtggaatggaatggattagagtttagagcagtggcgtggagtggagtggaatggagtggaatggagtggaatgaaatggagtggagtggaatggaatgaaatggatcagaatgctatggaatggaatggaacggaatggagtggagtggagttgagtggagtggatgggatagcagtggaatggaatggaatgaaatgcaattgaatgaaatggagtggaatcatgcaatgaaatgtgagctaagattgtgccactgcactctagtctgggagacagagtgagatatagtcgaagtaaaagaatggattgaaatgcagtagaatataatggaatggagtggagtggaatggaatgaagtggaatagaatggagtggagtggaatggaggggagtggattggagtggagtggaatggagtggaatggaatgaaatggagtggagtggagtggaagaaatagagtggaatgaagtggagtggaatggagtggaggggagtgagtggaatggggtgcagtggaatggaatggagtggactggagtggaagggagtggaatgaattggaatggaatggattggaatggaatgaatggagtggaatggagtggagtgtattggagtggattgtagtggagggaagtggaatggagtagaatggagtgaaatggagtggagtggagtggagtggaatggaatggagtttaatggaatggaaaggaacgtaccagaacagaatggaatggaacggaatggaatggagtggaatggagtggaattgtgtggagtggatcggagtgcagtggaatggaatggaatggaatggaatggaatggaatggaatggaatggaatggaatggagtggagtggggtggagtggataggagtggaatggaatggagtggtgttgagtaaactggaatagagtggaatggaatggagtggattggaatgcaatggaaaggaacagaatggaatgaatggaacagaatggtatagaacggacggaaaggagtggagtggaatggagttgagtggagtggatcggattgctgtggaatggaaaggaatggaatggaatggaatggaaaggaatgtagtggaatggagtggagtggagtggaatggagaggagtggaatggagtgtagtggaatggagtggggtggagtggagtgcagtggagtggagtgcagtggagtggaatgtagtggtttggagtgtaatggaatggagtggaatgcaacggaacagaggagaatgcaacagaatggaatggaatggagtggagtggagtagagttgagtggagtggatcagactgcagtgtaatggagtggaatggaatttaaagtaatcgagtggactggagtggagtggagtttagtggagtgcggtagaatagttgtctattaggtccgcttggtgcagagctgagttcaattgctgggtatccttgttgactttctgtcttgttgatctgtctaatgttgacagtggggtgttaaagtctcccattattaatgtgtgggagtctaagtctctttgtaggtcactaagcacttgctttatgaatctgggtgctcctgtattgagtgcatatatatttaggatagttagctcttcttgttgaattgatccctttgccattatgtaatggccttctttgtctcttttgatctttggtggtttaaagtctgttttatcagagactaggattgcaacccctgcctttttttgttttccatttgcttggtagatcttcctccattcttttattttgagcctatgtgtgtctctgcacgtgagatgggtttcctgaatagagcacactgatgggtcttgactctttatccaatttgccagtctgtgtcttttaattggagcatttagtccatttacatttaaagttaatattgttatgtgtgaatttgatcctgtcatgatgatgttagctggtgattttgctcgttagttgatgcagtttcttcctagtctcgatggtctttacattttggcataattttgcagcggctggtaccggttgttcctttcgatgtttagtgctttcttcaggagctcttttcgggcaggcctgctggtgacacaatctctcaacatttgattgtctgtaaagtattttatttttccttcacttatgaagcttagtttggctgggtatgaaattctgggttgaaaattcttgtctttaagaatgttgaatattggcccccactctcttctggcttgtagggtttctgccgagagatccactgttagtctgatgggcttctctttgagggtaaccgacctttctctctggctgcccttaacattttttccttcatttcagctttggtgaatctgacaatgatgtgtcttggagttgctcttctcgaggagtatctttgtggcgttctctgtatttcctgaatctgaacgttggactgcctgcagagtgttttccaacttggttccattctccccatcactttcaggtacaccaatcatacgtagatttggtcttttcacatagtcccatatttcttggaggctttgctcatttctttttattcttttttctctaaacttcccttctaacttcatttcattcatttcatcttccatcgctgatactctttcttccagttgatcgcatcggctcctgaggcttctgcattcttcacgtagttctcgagccttggttttcagctccatcagctcctttaagcacttcactgtattggttattctagttctacatttttctaaatttttttcaaagttttcaacttgtttgcctttggtttgaatgtccttccgtagctcagaataatttcatcatctgaagccttcttctctcagctcatcaaagtcattctccatccagctttgttccgttgctggtgaggaactgcgttcctttggaggaggagaggcactctgctttttagagtttccagtttttctgctctgttttttccccatctttgtggttttatctacttttggtctttgatgatggtgatgtacagatgggtttttgttgtggatgtcctttctgtttgttagttttccttctaacagacaggaccctcagctgcaggtctgttccagttttgaacattctttttgtagaatctgcaagtggacatttggagtgcattgcaacctatggtagcaaaggaaatatcttcacataaaatctagaaagaagcaacctgagaaacttctttgtgatgtgtgcattcatatcacagagttaaacatttcttttgatggagaagttttgaaactatctttttgtagatctagcaattggacatttggagcactttgaggcctatggtggaaaaggaaataccttcacataaaaactagagagaagagttctgagaaacttccttgtgattcatacgttcatctcacagatttgaacctttcttttgatggagcagttttgaaactctctttttgtagaatgtgcaagtggacgtttggagcgctttgaagcctatggtgtaaaaggaaatatcttcacataaaaaccagatagaagctttctgagaaacttctttgtgatatgtgcattcgtgtccctgacttgagcatttcttttgaaggaccagttttcaaatactgtttttgtagaatctgcaagtggacaattcgagtgtcttgaggcctatggtggaaaagaaaatatcttcacataaaaactggacagaagaattctgagaaacctctttgtgatgtgtacattcgtatctcaaagtttaatctttcttctgaaggaccagttttgaaatcctctttttgaagaatccgctagcagacatattgtacgccttgaggcgtatgctggaaaaggaaatatcttcacataaaatctagacagaagcaatctgagaaacttccttgtaatgtgttcatttatctcacagagttaaacctttcttttgattgagcagtcttgaaactctctttttgtagaatctgtaagtggacattttgtgtgttttgaagcctatggtggaaaaggaaatatcttcacataaaaatcagatagaaacattctgagaaacatctttgtgatgtgtacattcatctcacagagttaaacctttcttttgatagagcagttttgaaactctcttttgtggaaactgcaagtggacatttcgagcaccttgagtcctatggtggaaaatgtaatatcttcacacaaatattagatagaataattctgagaaacttctttgtgatgtgtgcattcacctcaaagagttgaaccattcttttgattgaggagtttggaaacactctttttgtagtatctgcaggtggacatttggaaagctttttggcctatgatagagaaggaaatatcttcacataaaatctagacagaagaaatctgagaaacttcctcgtgatgtgtgcattcatctcatagagttaaaactttcttttgattgagaagttttgaaactctcttttttaagtctgcaagtggacatttggagcagtttgaggcctgtggtggaaaaggaaatatcttcacataaaaactaaacagaagaattctgagatagtttttgtgatgtgtgtgttcacctcacagagttgaaccattcttttggatgagcagtttggaaacactcttgtagaatctgcaagtggatatttggagtgctttgcggcctatggtagaaaaggaaatatcttcacataaaatctagacagaagaaatctgagaaacctcttcatgatgtgtgcattcatacccagagtttaagctttcttttgatgggtcagttttggaatactctttttgttggatctgcaagtggacattttgaacaccttgaggcctatggtggaaaatgaaatatcttcacgtaaaaactaaacagaagaattctgagaaacttctttgtgatgcgtgcattcacctcacagagttgaacatttcttttgattgagcagtttggaaacactctttttgtagaatctgcaagtggacattcagagggctttgtggcctatggtagaaaaggaaatatcttcacataaaatctcgacagaagcaacctgagaaacttatttgtgatgtgtgcattcatcacacagagttaaaacctttttttaattgagcagttttgaaactctctttttgtagaatctggacgtagacaagtgcagcattttcaggcctatggtggaaaaggaaatatcttcacataaaaactagacagaagaaatctgagaaacttccttgtgatgtgtctgttcatctcacagagttgaaactttcttttcattgagcagtttggaaacatgctttttgtagaatctgcaagtggacattcagagggctttgtggcctatggtagaaaaggaaatatcttcacataaaatctagacagaagcaatctgagaaaattctttctgatgtgtgcattcatctcacagagttaaacctttcttttgattgagcagttttgaaactctttttgtggaatctgcaagtggacatttggagtgcttttcggcctatgataaaaaaagaaatatcttcacataaaatctagacagaagccatctgagaaacttctttgtgatgtctgcattcatctcatagagttaaaattttctttgaatgagcacttttgaaactctcttttgtagaatctgcaagtggacatttggagtgctttgagacctatgataggaaaggatatatcttcacataaaatctagacagaagcaatttgagaaacttcaccatgatgtatgtattcaagtcacagagttaaacctttctttttaattgagcagttttttttttgtttgtttgtttgtttttttagaatctgttagtggacgtttaaggcgctttgaggcctatgaaggaaatggaaatatcttcacctaaaaactaaacagatttctgagaaacttctttttgatgtgtacgttcatctcacagagttgaacctttcttttattgagcagtttggaaacactcttttcgcagaatctgcaagagtatatttggagagttttgaggcctatggaggaaaagaaatatcttcagataaaaactaattagaagcattctgagaaactcctttgtgatgagtgcattcatgtcccagagttcaacatttcttttgatgggccagtattgaaataatctttttgtggaatctgcaagtggacatttggaacgccttgaggcctatggtggaaaatgaaatatcttcacgtaataactagacagaataattccaggaaacttcaattgtgatgtgtgcattcatctcacagagctgaacctttcttttgattgagaagtttggaaacactcttttggcgaatctgcaagtggaaaatttgtatgctttgcagtcaatggtagaaaaagaataatcttcaattaaaatctacacggaagcaatctgagaaacttctttgtgatatgtgcattcatctcacagagttaaacctttattttgactgagcagttttgaactctctttttatataatctgcaagtggacgtttgaacagatatgaggcctacggtggaaaaggaaatatcttcacataaaaactagaaagaagaattctgagaaccttctttgtgatgcatgcgttcatctcacagatttgaacctttgtttggattgagtagtttggaaacactctttttgtaaaatctgcaagtggacatttggagcactttgcggcctaaggtagaaaacaaatatcttcacataaaatttagacagaagcaatctgagaaacttctttgtgatgagtgcattcatctcacagagttaaacctttctttggattgagcagttttgaaattctctttttgtagaatctgcaagtgaacatttggtgggctttgaggcctttggtggaaaagaaaatatctttatattaaatttagacagaagaattctgagaaactgttttgtgatgtgtgcgttcatctcacagagttgaatctttcttttgattgagcagtttggaaacaatcatttgtaggatctgcaaatggccatttggagtgctttgtggcctgtggtagaaaaggaaatatcttcacataaaatctagaaggaagcaatctgagaaacttctttctgatgtgtgcattcatgtcacagagttaaaactttctttatattgagcagttttgaacctctctttttgtagaatctgcaagtggatgtttagagcgatttgatacctatggtggaaaagaaaatatcttcacaaaaaaactagacagaagaattctgaaaaactactggtgatgtttgcgttcatctcacagagttcaaagtttcttttgatggagcattttggaaacactcattttctagaatcttcaggtggacattaggagggctttgaggcctatggtgaaaaaggaaatatcttcacatgaaaactagagagaagaattctgtgaaagttcttttgttgtgggcgttcatctcacccagatgaaccttcttttgattgagcagtttggagactctccttctttagaatctgtaagtggatatttggagacctttgtggcctatggcagaaaaggaaatatcttcatataaatctctgccgcagcaacctgagaaacttctttgtgatgtgtgcattcatctgacagagttgaacctttcttttgattgagcagttttgcaactctctttttgtagaatctgcaagtggacattttgagggctttgaggactaaggtggaaaaggaaatatcttcacataaaaactagacagaagaactatgaaaaacttctttgtgatatgtgcgttcatctcacagagttgaaactttcttttgattcagcagtttggaaacactcttttcgtagaatctgccagtggacatttggagtgcttggcggcctatagtagaaagggaaatatcttcatcttaagtctagacagaagcaatctgagaaacttctttgtgaagtgtgcattcatctccaagagctgaaccttccttttgatgtatcagttttgaaatactctttttgtagaatctgcaagtggacatttggaacgccttggggccaatggtagaaaagggtatatcttcatttaaaatctagacagaagcaatctgagaaacttctttgtgatgtaggcattcatctgacagagttaaacctttcttttgattgagcagtttggaaactctctttttgtagaacctgcaaatggacatttggagaactttgagtcctatgatggaaaaagaaatattctcacataaaaactagacagaataattctgagaaacttctttttgatgcgtgtgttcatctcaaagagttgagcctttcttttgattgaggagtttggaaacactttatcttgtagaatctgcaagtggacatttggagcgttttgcagcctatggtagaaaaggaaatatctacacataaaatctagacagaagctatctgaaaatcttctttgtgatgcgtgcattcatattccagagtaaagcctttcttttgattcagcagttttgaaactctctttttgtgtaatctggaagtggacatttggagggctttgaggccgatggtggaaaaggaaatatcttcaaaaataaactagacataagcattctgaataacttcttcatgatgtgtgcattcatctcccagagttgaagctttcttttaatggaccagttttgaaatactctttttgtagaatctgcaagtggacatttcgagcaccctgaggcctatagagggaaaagaaatactttcagataaaaatgagacagaagaattctgagaaacttctttgtgatttgtgcgttcatatcacacaggtgaaactttcttttgattgagcagtttggaaacactctttttgtagaatctgccaatggacatttggtgtgctttgaggcttatggtagaaaaggaaatctcttcacagaaaatccagacagaagcaatctgagaaacttctttgtgatgtgtgcattcatctcacagagtgaaaccttacttttgatggagtagttttgaaattctctttttgtagaatctgcaaattgacattgggagtgctttgaggcctacagtggaaaaggaaatatgttcacataaaaactagacagaagcattctgagaaacttctttgtgatgtgtgcattcatctcaaagagttgaaactttcttttgatggaccaggtttgaaatactccttttgtagaatctgccagggggcatttcgagcaccttgaggcctaaggtgaaagtgaaatatcttcatataaaatcttgacagaagcaatcttagaaacttctctgtgatgtgtgcattcatctcactaagtgaaacctttcttttgattgagcagttttgaaactctctttttgttgaatctgcagttggacacttggagcgctttgaggcctaaggtggaaaaggaaatatcttcacataaaaactagacagaagaattctgagaaacttctttgtaatgtgtgcgttcatttcacagagttgaacctttcttttgattgagcagttttgaaacactcttattgtagaatctgcatgtggacatttggagcactttgtggcctatggtagaaaaggaaatatcttcacataaaatctagacagaagcaatctgagaaaattctttgtgatgtgtgcattcaccttacagagtaaaacctttcttttgattgagcacttttaaaactctctttttgtaggatctgcaagtggacatttgtagcaccttgaggcctatgatggaaaaggaaatatcttcacttaaaaaataaacagaagaattctgagaaacttcttttttatatgtgtgttcatctcacagagttgaacctttgattgagcagtttggaaactctctttttgtagaatctgcaagtggacatttggagtgttttgtagcctatggtagaaagggaaatatctttacatacaatctagacagaagtaatctgagaatcttctctgtgatgtgtgcattcatctcacagagttaagcctttattatgattgagcacttttgaaactctctttttgtagaatctgcaattggacatttggaaggctttggggcctatggtggaaaaggaaatatcttcacataaaaacaagatagaagcgttctgagaaacttctttgtgatgtgtgcatccatctcccagagttgaacctttctttggatggaccagttttgaaatactgtttttgtaggatctgcaagtggacattttgagcgccttgaggcctacggtggaaaaggaaatatcttcacatagaaactagacagaagcattctgagaaacctctttgtgatgtgtgcattcatctcaaggaggtgaaactttcttttgatggaccaggttcgaaattctccttttgtagaatctgccagggggcattttgagtgccttgaggcctatggtggaaaatgaaatatcttcatataaaaactagacagaagcattctgagaaagttctttgtgatgtgtgcattcatctcacagagttgaatctttcttttgattgagaagtttggaaacactgtttttgtagaatctgcaaggggcagttggaacgcttattgttctatggtggaaaaggaaataacttcatataaaatctagacagaagcaatctgagaaactttttgtgatgtgtgctttcatctcacagacttaaaccttccttttgattgagcagctttagaaatctctttttgcagaatctgcaagtggacatttggaatgcttttaggcctatggaagaaaaggaattatcttcacataaaaactagccagaagaattctgagagaattctttgtgatgtgtgcattcatctggcagagttgaacctttcttttgattgagcagtttggaaacactctttttgtagaacctgcaagtggacatttggagcactttgcggcctatggtagaaaaggaaatatcttcacaaaaaatctagacagaaccattctgagaaacgagtttttcttgtgtgcattcatctcacagagttaaccatttcttttgattgagcatttttgaaactctatttttgtagaatctgcaagtggacatttggagcactttgaggcctatggtgtaaaaggaaatatcttcacataaaaactagatagaagcattcagagaaacttctttgtgatgtgtgcaatcatttcccagagttaaacctttttttctgatggaccaattatgaaatagtctttttgtagaatttgcagttggacatttcgagcaccttgaggactatggtggaaaatgaaatatcttcacataaaaactagacacaagtattctgagcaacttctatgtgatgtgtgcattcatctcacagagttggacctttcttttgattgagaagtttgtaaaccctctatttggagaatctgcaagtgtacatttggagtgctttgccacctatggtagaaaaggaactatcttcacataaaatctagacataagcaatcagagaaactactttgtgttttgtgcatgcccctgagagagttaaacctttcttttgattgaggagttttgaaactctctttttgtagaatccgcaagtcgatatttggagggcattaaggcctctggtggaaaaggaaatatcttcacataaaaactaaacagaagaattctgagaaacttctttgtgatgcgtgcattcatcttacagaggtgaacctcttttttgattgagctgtttggaaacattctttttgtggaatctacaagtggatatttggaacgctttggggcctgtggtagaaaaggaaatatcttcacataaaatctagacagaatcaacctgacaaacgtccttgtgacgtgtgcttttgtctaagagagttaaacctttcttttgattgaggagttttgaaactctccttttgtaaaatctgcaagtggatatttggagtgctttgaggcctatggtggaaaaggaaatatcttcacataaaaactagacagaagagttctgagaaacttctttgtgatgtgtgcgttcatctcacagtgttcaaagtttcttttcatggagcaatttggaaacactctttttgtagaatcttcaagtggacatttggagggctttgaggcctctggtggaaaagcaaatatcttcacatgaaaactggagagaagaattctgtgaaacttttttctgatacatgcgtccatctcacacagatgaaccttccttttgattgggcagtttggagacactctttctgtagaatctgcaagtggacgtttggagccctttgtgaccaatggtagaaaaggaagtatcttcatataaatctctgccgaaacaaccagataaacttctttgtgatgtgtacattcatctcacagagttgaacctttcttttgattgagcagttttgaaacactctttttgtagaatgtgcaagtggatatttggagctctttgtggcctatggcagaaaaggaaatatcttcacataaaaattacaaagaagcattctgatagacatgtttgtgttgagtgcattcagctcacagaattgaacctatgttttgattgagcaggtttgaaacactctttgtagaatctgcaagtggatatttggatcgatttgacgcctattgtggaaaaggaaatatcttcacataaaacctacacagcagcattctgagaaacttctttgttttgtgtgcattcaactcatggagtcaaacctatcttttgattgagcagttttgaatctctctttttgcataatctgtgagtggatatttggagagatttgaggcctattgtggaaaaggaaatatcttcacagcgaaactacacagaagcattctgagaaacttcatggtgatgtgtgcgttcatctcacagagatgaatctttcttttcatttagcagttttgaaacactgtataatctgcaagcggatagttggagtgctttgaggcctattgttgaaaagaaaatatcttcaaatgaaatctacacagaagcattctgagaaacctctttgtgatgtgtgcattcatctcacagagttgaacctttcttttgattgagcagttttgaaaaactctttatgtagaatctgcaagttgatatttggagcgcttagattcctattgtggaaaaggaaatatctttacataaaaactgcatagaatcattctgagaaacttctgtgggatgtgtgcattcatctcacaatgttgaacctttcttttcattcagcagttttgaatctttctgtttgtagaatctgcaagtggatatatggagagctttgaggcctatggtggaaatggaaatatcttcacataaaaactacacagaagtattctgagaaacacctttgttaaggttaagtgtgcattaaactcacagagttgaaactttcttttgattgagcagttttgaatctctcttttggtagaatctacaagaggatatttggagccattttcagcctatggtggaaaaggaaataccttcacatgaaaactacaaaaaagatttctgaggaacttctatgtcatgtgtgccttcatctcacagagttgaacctttcttttgatttagcagtttggaaacactctttttgttgtatctacaagtgactgtttggaccactttgaagcctatggtggaaaaggaaatatctttaaataaaaactacacagaagcattctgagaaacttctttgtgatgtgtgctttcatctcacattattgaacctatcttatgattgggcagttttgaaacactctttttatagaatctgcaagtgtatatttggagccgatgtggcctattgtgaaaaaggaaatatcttcacataaaaactacacagaagcattctgagaaaccactttgtgatatgtgcattaaactcacagagttgaatctatcttttcattgagcagttttgattccctctttttgtaggatttgcaagtggtcatatggagccctttgcggcctatggaggaaaaggaaatatcttcaaataaaaactacccagaagcattctgaggaacttctttgctatgtgtgcattcaactcacagagttgaaactatcttatgattcagcagttttgaagcactgtttttgtagagtcttcaagtggatatttggagcactttgaggcctactgtggaaaagcaaatatcttcacataaaaactgcacagaagcattctgagaaacttctttgtgatgtgtgcattcaactcacagaatcgaacctatattttgatggagcagtttttaatctctctttttgcagaatctgcaagtggatatttggaggcctttgaagcctagtgtggaaaaggaaatatcttcacataacaactacacagaagcattctgagaaactttttgtgatgtgtgtattcaactcacagagttgaacctatgttttgattgaacagttttgaatcgctctttttgtagaatctgagagtgaatatttgcagtgcttttaggtctattgtggaaaaggaaatattttcacataaaaactacacagaagctttctgagaaatttctttgttatgagtgcattcatcacacatagttgaacctttctttttgattgaacagttttgtaacactctttatgtagaaactgcaagtggatatttggagggctttgaggtctattttggaaaaggcaatatcttcatatcaaaactacacagaagcattctgagaaacttctttgtgatgtgtacattcaactcacagtgttgaaactatcttttgatagagcagttttgaaacactctttttgtagaatctgcaagtgtatatttggaaagctttgaggcctactgtggaaaaggaaatatcttcatgtaaaaactacacttaggcagtctgagaaacttctttatgatgtgtgcattcatcatacagattttaacttcttttgattgagcagatttgaaacactctttttgtagaatcggcaggtggatatttggagggttttgaggcctattttggaaaaggaaatatcttcacataaaaactacacagaagcattctgagaaacatctttgtgatgtgtacattcaactcacagagttgaaccaatgtcttagtggagcagttttgaatctttttgtggaatcttcaaccggatatttggagcccttatcagcctatggtggaaaaggaaatatctttaaataaactctacacggaggaattgtgagaaatttctttgtgatgtgtgaactcatctcacagagttgaaatttccttttgattgagcagttttgaaatgctgttttcatagaatctgcaagtggatatttggagcgctttgaggcctattgtggaaagggaaatatcttcacataaaaactacacagaagcattctgaaaaactactttgtgatgtgtgcattcatctcacagtgttgaaattttcttttgattgagcaattctgaaatgctgttttcatagaatctgcaagtggatattcagagcgctttgaagcctactgtggaagaacaaatatcttcacataagaactgcactgaggcattctgagaaacttcttcatgatgtgtgcattcaactcacatagttgaacctatcttttgattgggcagtattggatctctcttcgtagaatctgcaattggatatttggtgccctttgtggcctatgaatgaaaaggaaataccttaaaagaaaaggtacacagaagcattcagagaaacttcttcatgatgtgtgcattcatctcacagaggtgaacctttcatttgattgagcagttttgaaacactctctttgtagaatctgtaagtggatacttggagccttttgaggcctactgtggaaaaggaaatatcttcacataaaaactacacagaagatttctgggaaacttccctgggatatgtgcattcctctcacagagttgaacatttcttttgattgagcagtttggaaacactctttttgaaccgtctgcaagtggatatttggagtaattgaggcctactctgaagaagaaaatatcttcacataaaatcaacacagaggcattctgagaaacttctatgagatgtgtgccttcatctcacagagttgaacatttcttttgattgagcagttttgaaacaatctttttgtaggatctgcaagcagatatttggagccctttgtggcctaaagtggaaaaggaaatatcttcaaataaaaactacacagaagcattctgaggaacttctttgttatgtgtgcattcaactcacagagttgaaattatcttatgattcagcagttttgaaacactgtttttgtagaatcttcaaatggatatttggagcgttttgaggcctactgtggaaaagcaaatatcttcacataaaaacttcacagaagaattctgggaaacttctttgtgatgtctgcattcatctcacacagctgaacctgtcttatgatagagcagtattgaaacaatctttttgtagaatccacaagtggatatttggagtgttttgagacctattttggaaaacaaaatatcttaacataaaaactacacaaaagtaccctgataaacttatttgtgatgtgtgcatttatctcagagatttgaaactatcttatgatttagcagttatgaaacactctatttgtagaatctgcaagtggatatttggggccttttgaggactattgtggaaaaggaaatatcttcacataaaaacaacacagaagcattctgagaaacttctttgtgatgggtgcattcatctcacagggttgaacctattttataattcagcagttttgaaatactctatttgtagaatatgcaagtggatatttggagcgctttgaggccaacagttgaacagcaaatatatttacataaaaactacacagaagcattctgagaaacttctttgtgatgtgttcattcatcttacagagttgaacctttcttttgattgagcagttttgaaacactctttgtgtagaatctgcatttggatatttggagaactttgatgcatattgtggaaaaggaaatatcttcaaataaaaactacacagtagcattctgataaacttctttgtgaattgtgaattcctctcacagagtttaacctatgttttgtttgagcagtttttaatctctttttgtagaatctgaaagtggatatacagagtgctttgaggcctattgtggaaaaggaaatatcttcacataaaaatttcacagaagtattctgagaaactactgtctgatgagtgtattcatcacacaggatgaacgtgtcttttgattgagcagtattgaaacactgtttttgtatattctgcaagtggatatttggaacgctttgaggcctattgtggaaaagaaaatatcttcacttaaagaccacacagaagcattctgagaaacttctttgtgatgtgtacattcaactcaccgatgtgaatctatcttttgattagcagttttgaaactctctttttgtagtatctgcagttgtatatttggagccctttgagacctatgatggaaaaagaaatgccttcatatgaaaactacacagaagtattctgagaaactcctttgtgatgtgtgcattcaactcacagatttgaacctatcatttgattgagccattttgaaactgtctttttctattatctgcaagtgaatatttctagccttttgtggcctattttggaaaaggacatgccttcacataaaaaacaaacagaagtattctgagaaacttctttgtgatgtgagcattcatctcacagagatgaacctttcttttgattgagcagttttgaaagaatctttttgaagtatctgcaagtgaatatttggagcactttgaggcctaatgtgtggaagaaatatcttcacataaaaactacatagaagctttctgagaaacttctctgtgatgtgtgcattcaactcatggagttgaacctattttttcattgaacagttttgaaactctttttgtagaatctgcaagtggatatttggagccatttgtggcctatggtggaaatgggaatatcttcaactaaaaactacacagaagcattctgagaaacttcgtggtgatgtgtgcattcatctcacagagatgaatctttctttttcatttagcagtttttaaacactctgtttgtagaatctgcaagtggataattggagcactttgaggcaaatagttgaaaagaaaatatcttcacatgaaatctacacagaagcattccgagaaacctcttcgtgaagtgtgctttcatctcacagagttgaacctttcttttgattgagcagttttgaaaaactctttttgtagaatctgcaagttgatatttggagcgcttaggttcctattgtggaaaaggaaatatcttcacataaaagctgcacagaatcattctaagaaagttctgtgtgatgtgtgcattcatctcacagtgttgaacttttcttttcattcagcagttttgaaactttctttttgtagaatctgcaggtggatatttggagctctttgagtcctatggtggaaatggaaatatcttcacataaaaactacacagaagcattatgagaaacatctttgttaacacagaagcattctgagaaacatatttgttaagtgtgcattaaactaacagagttgaaactatctttcgattgagcagttttgaatctcactttttgtagaatctgcaagaggatatttggagccctttgcggcctacagtggaaaaggacataccttcacataaaaactacaaaaaagatttctgaggacattctttgtcatgtgtgccttcatctcacggagttgaacctttcttttgattgagcagtttggaaacactttttttgtagtatctaaagtggatgattggatcgctttgaggcctatggtggaaaaggaaatatcttcacatgagaactacacagaagcattctgagaaacttctctgcaatgtgtgcattcaactcacaagtttgaacctatcttttgattcagcaattttgaaactctctttttgtagaatccgcaagtggatatttggaactatttgctacctattgtggaaaaggagatatcttcacataaaaactacagagaagcattctgagaaacttctttgtgatttgtgcattcatctcacagagttgaacctttcttttgattaagcagttatgaaacagtctttttaaaggatcagcaagtggatatttggaggacttttaggcctattgtgtaaaaggagatatcttcacataaaaactaagcagaaccattctgagaaactactttgcaatgtgtgcattcatctcacagagttgaaactttcttttgattgagcagtttggaaacactcactttgtagaatctgcaagtggatatttggagcgctttgtggcctatggtggaaatgggtataccttcacataaaaactatgtggaagtattcagagaaacttctttgtgatgtgtgcatacaactcacagagttgaaactttcgtttggttgagcagttttgaaactctctttttgtagaatctgcaagtggatatttggagccctttgtggcctatggtggaaagggaaatattttcacataaaaactacacagaagccaactggcaaatgaggtggcagtcaagatggccaaataggaacagctctgttctacagctcccagcatgagtgacacagaagatgaatgatttcctcatttccatctgagatacctggttcatcccactagggagtgccagacagttggcgcaggatagtgggtgcagcgcaccatgtgtgggcagaagcagagtgaggcatttcctcacttgggaagtgcaagtggttagggagttccctttcctagtcaaataaaggggcgacagacggcacctgggaaatccagtcactcccacactaatactgtactttttcaatgggcttaaaaaatggcgcaccaggagattatatcccacaccttgcttggagggtcctatgtccacggtgtctcactgattgctagcacagcagtctgtgatcaaactaaaaggtggcagtgaagctgggggtggggcaccccccattgcccaggcttgcttaggtaaacaaagctgctggaaagctcgaagtaggtgtagcccaccacagctctaggagacctgccttcctctgtaggctccacctctgggggcagggcacagacaaacaaaaagacagcagtaacctctgcagacttaaatgtccctgtctgacagctttgaagagagcagtggttctcccagcacacagctggagatctgagaatgggcagactgcctcctcaagtgggtacctgacccctggaccccgagcagcctaactgggagacacccctcagtaggggcagactgacacctcacatggccgggtagtcctctgagacaaaatttccagagcaaagatcagacagcagcattcgtggttcatgaaaatccgctgttctgcagtcacagctgctgatatccaggcaaacaggatctggagtggacctccagcaaactccaacagacctgcagctgagggtcctgtcttttagaaggaaaactaacaaacagaaaggacatccacaccaaaaacccatctgtatatcaccaccataaaagaccaaaagtagataaaaccacaatgatggggaaaaaacagagcagaaaaactagaaactctaaaaacagagtgcctctcctcctccaaaggaatgcagttcctcataagaaatggaacaaagctggacggagaatgactttgacgagttgagagaagaaggcttcagacaatcaaattactcggagctacaggaggaaattcaaaccaaaggcaaagaagttaaaaacattgaaaaaatttagacgaatgtataactagaataaccaacacagagaagtgcttaaaggagctgatggagctgaaagccaaggctccagaactacatgaaaaatgcagaagcctcaggagcagatacgatcaactggaagaaaaggtatcagtgatggaagttgaaataaatgaaataaagtgagaagggaagtttagagaaaaaagaataaaaagaaatgaacaaagactgcaagaaatatgggactatgtgaaaagaccaaatctacgtctgattggtgtacctgaaagtgatgtggagaatggaaccaagttggaaaacactctgcaggatattatccaggagaacttccccaatctatcaaggcaggccaacattcagattcagaaaatacagagaatgccacaaaggtactcctcgagaagagcaactccaagacaaataattgtcagattcaccaaagttgaaataaaggaaaaaatgttaagggcagccagagagaaaggtggtgttaccctcaaagggaagcccatcagactaacagcagatctcttggcagaaactctacaagccagatgagagtgtgggccaatattcaacatttttaaagaaaagaattttcaacccagaatttcatatccagccaaactaagcttcataagtgaaggagaaataaaatactttacagacaatcaaatgctgagagattgtgtcaccaccaggcctgccctaaaagagctcctgaaggaagaactaaacatggaaagaaacaaccagtaccagccagtgcaaaatcatgccaaattgtaaagtccactgtggctagtaagaaactgcatcaactaacgagcaaaataaccaaaaaacatcataacgacaggatcaaattcacacataacaatattaactctaaatgtaaatggactaaatgctccaattaaacacacagactggcaatttggataaagagtcaagacccatcagtgtgctgtattcaggaaacccatctcacatgcagaaacaaacataggctcaaaatgaaaggatggtggaagatctaccaagtaaatggaaaacaaaaaaaggcaggggttgcaatcctagtctctgataaaacagactttaaatcaacaaagatcaaaagagacaaagaaggccattacataatagtaaagggatcaattcaacaagaagagctagctatcctaaatatatatgcactcaacacaggagcacccagattcttaaagcaagtcctgagtgatgtacaaagagacttagactcccacacaataataattggataatttaacaccccactgtcaatattagacagatcaacgagacaaaaagttaacaaggatacccaggaattgaactcagccctgcaccaagcggacctaatagacatctacagaactctccaccccaaatcgaaagaatatacatttttttcagcacctcaccacacctattccaaaattgaccacatagttggaactaaagctatcctcagcaaatgtaaaagaacagaaattataacaaactgtctctcagaccacagtgcaatcaaactggaactcaggattaagaaactcactcaaaaccgctcaactacatggaaactgaacaacctactcctgaatgactactgggtacataacaaaatgaaggcagaaataaagatgttctttgaaaccaatgagaacaaagacacaacataccagaatctccgggacacattcaaagcagtgtgtagaaggaaatttatagcactaaatgcccacaagagaaagcaggaaagatccaaaattgacaccctaacatcacaattaaaagcaccagaaaagcaagagcaaacacattcaaaagctagcagaatgcaagaaataactaaaatcagagcagaactgaaggaaatagagacacaaaaaacccttcaaaaaattagtgaatccaggagcttgttttttgaaaagatcaacaaaattgatagaccactagcaagactaataaagaagaaaagaaagaagaatcaaatagacgcaataacaaatgataaagtgagtatcaccattgatcccacaaaaatacgaactaccatcagagaatactacatacacctctacacaaacaaactacaaaatctagaaggaatggataaattcctagacacatacaccctcccaagactaaaccaggaagaagttgactctctgaatagaccaataagaggctctgaaattgtggcaataatcaatagcttaccaacaaaaagagtccaggaccagaaggatttacagccaaattctaccagatgtacaagggggaactggtacctttccttctgaaattattccaatcaatggaaaaagagggaatcctcccaaactcattttatgaggccagcatcatcctgataccaaagccgggcagagacacaacaaaaaaacaaaattttagaccaatatccttgatgaacattcatgcaaaaatcctcaataaaatactggcaaaccgattccagaagcacatcaaaaagcttatccaatatgatcaagtgggcttcatccctaggatgcaaggctggttcaatatatgcaaatcaataaatgtaatccagcatataaacagaaccaaagacaaaaaccacatgattatctcaatagatgcagaaaaggcctttgacaaaattcaacatcccttcatgctaaaaactctcaataaattaggtattgatgggacgtatctcaaaataataagagctagctatgacaaacccacagccaatatcatactgaatggccaaaaactggaagcattccctttgaaaactggcacaagacagagacgccctctctcaccagtcctattcaacatagtgttgggaattctggccagggccattaagcaggagaaggaaataaagggtattcaattaggaaaagaggaagtcaaattgtgctcgtttgcagatgacatgattgtatatctagaaaaccccattgtctcagcccaaaatctccttaagctgatgagcaacttcagcaaagtctcaggatacaaaatcaatgtgcaaaaatcacaagcattcttatacaccaataacagacaaacagagccaaatcaagagtgaactcccgtttgcaattgcttcaaagagaataaaatgtgtaggaatccaacttacaagggatgtgaaggacctcttcaaggagaactacaaaccactgctcaatgaaataaaagaggatataaatatatggaagaacattccatgctcatgggtaggaagaatcaatatcgtgaaaatggccatactgccgaaggtaatttatagattcaatgccatccccatcaagctaccaatgaccttcttcacagaattggaaaaaaactactttaaagttcatatggaaccaaaaaagagcccgcatcaacaagtcaatcttaagccacaagaacaaagctggaggcatcaggctacctgacttcgaactatactacaaggctacagtaaccaagacagcatggtactggtaccaaaacagagatatagatcaatggaacagaacagagccctcagaaataacactgcatatctacaactatctgatctttgataaacctgaacaaaacaagcaatggggaaaggattccctatttaataagtggtgctgggaaaactggctagccatatgtcgaaagctgaaactggatcccttccttacaccttatacaaaaattaattcaagatggtttaaaaagttaaatgttagacctagaaccataaaaatcctagaagaaaacccaggcattaccatacaggacgtaggcgtgggcaaggacttcatgtctaaaacaccaaaaacaatggcaacaaaagctataattgtcaaatgggatctaattaaactaaagagcttctgcacagcaaaagaaactaccagcagagtgaacaggcaatgtacaaaatgggagatagttttcacaacctacttatctgacaaagggctaatatacagaatctacaatgaactcaaacaaatttacaagaaaaaaaacaaacaaccccatcaaaaagtgggtgaaggacatgaacagacacttcccaaagaagacatttatgcagccaaaaacacatgaaaaaatgcttatccttaactggccatcagagaaatgcaaatgaaaaccacaatgagataccacctcacaccatttagaatggcaatcattaaaaagtcaggaaacaacaggtgttggagaggatgtggagaaatagaaacacttttacacttttggtggggctgtaaactaattcagccattgtggaagtcagtgtggcgattcctcagggatgtagatctagaaatacaatttgacccagacatcccattactgggtatatacccaaggactataaatcatgctgctataaagacacatgcacacgtatgtttattgcagcactattcacaatagcaaagacttggaaccaacccaaatgtccaacaataacagagtggattaagaaaatgtggcacatatacaccatggaatactatggagccatacaaaaatgatgagttcatgtcttttgtagggacatggatgaaattggaaatcatcattctcagtaaactatcgctaggacaaaaaaccaaacactgcatgctctcactcataggtgggaattgagcgatgagaacacatggacacaggaaggggaacatcacactctggggactgatgtggggtgggggtaggggggagggagagcattaggagatatacctaatgctaaatgacgagttaatggatgcagcacaccaacatggcacatgtacacatatgtaactaacctgcacaatgtgcacatgtaccctaaaacttaaagtataataataataaaataaattaaatttaaaaaaaaactacacagcagtactctgagaaacttctttgtgatgaatgcatgcaactctcagagttgaacatatcttttgattgaacagttttgaaaatatatttttgtagaatctggaagtggatatatggagccctttgcggcctatagtgcaaaaggaaacatcttcacataaaacctacacagaagcgttctgagaaatttcttggtgatgtgtgcattcatctcacagagttgaatatttcttttgattgtgcagcttgaaatactgtttttgtggaatctgcaagtggatacttggagtgttatgtggcctattgtggaaaacgaaataccgtcacataaaaacttcacggaagcattctgagaaacttctttgttatatgtgtattcaactcacagagttgaacctgtctttttaaagagcaattttgaaactgtctttttgtagaatctgcaagtggatatatggagccctttgtgacctatggtgtaaaaggaaatatcttcacaaaaaaactacacagaagcattctgagaaacttctctgtgaagggttcattcatctcacagacttgaacctttcttttgtttgagcagtttggaaacttttttttgtagaatcagtaagtggatatttggaaggcttaggggactattgtggaaaaggaaatatcttcacataaaaactacacagaagcattctgagaagcttctttgcgatgtgtgcattcatctgacagagttgaaactttctttaagcagtttggaaacactctttttgtagaatctgcaagtggatatttggagccctttgaggcttatggtggaaaaggaaatatcttcagataaacactacacaggagcattctgaaaaactgctttgtgatgtgtgcattcatctcacagagttgaatttttcttttgattgagcagttttgaaacgcccttttcgtggaatgtgaaagtggatatttggagggttttgaggcctacggtggaaaaggaaatatcttcacataaaaactacaaagaaggattctgagaaacttatttgtgatgtatgcaatcaactcacagacttgaacatatctttggattgagcagctttgaaactgtctttttgtgcaatctgcaagtggatattttgagccctttgtggcctatggtgaaaaaggaaatatcttcagataaaaactacaaagaagcattctgagaaacttctttgtgatgtgtacattcatctcacagaataggaactttcttttgattgagcagttatgaaataccctttttgtagaatgatcatgtggatattttgagggctttgaggcctactgtggagaagttaatatcttcacatcaaaactactcagaatcattctgagaaacttctttgcgatgtgcgaattcatccgactgacttcaacctttcttttgtttgggcagtttagaaacactctttttatagaatctgcaagtgaatatttggagggaattgaggcctatggctgaaaaggaaatatctttacataaaaactacacaaaagcattctgagaaacttctttgtgatgtgtgcattcaaatcacagagctaaacctatcttttgattgaccagttttgaaactctcttttgtagaatctgcaagtggatatttggagtgctttgaggcctattgtggaaaagaaaatatcctcacataaaaactacacagaagcattctgagaaacttctttgtgatgtgtgcattcatctcaaggagttgaacgtttcttttgattgtgcagcttggaaacactgtttttgtagaatccgcaagtggatatttggagtgctatgtggcctatgatggaaaaggaaatatcttcacgtaaaaacttcacagaagcattctgagaaacttctttgttatgtttgtattcaagtcacatagttgaacctatcttttgatacagcagttttgaaactctctttttgtagaatctgcaagtggatattgggaaccctttgcagcctatggtgtaaaaggaaatatcctcacataaaaactacacagaagcatcctgagaaacttctttgtgatgtgtgcattcatctcacagagttgaacttttcttttgattgtgcagtttggaaacactccttttgtagaatctgtacgtggatatttggagggttttgagtcctacggtggtaaagaaaatgtcgtcacatgaaaaatacacagaggcattctgagaaacttctttgtgacgtgtggattcatctcccagagttgaacctatcgtttgattaagaagttttgaaactctctttttgtagaacctgcaagtggatatttggagccatttgcagcctctggtgtaaaaggaaatatcttcactttaaaactacacagaaacattctgagaaacttctttgtgacgtgtgcattcatctcacagatttgaaattttctgttgattcagcagttttgagacactttttttttgtagaatctgcagttggatatttggagcgctttaaggcctattgtggaaaaggaaatatctccacataaaaactatacagaaacattctgagaaacttctatgcgatgtgtgcattcatctgacagagttgaacctttctttagtttgagcagtttggaaacactctttttgtagaatctgcaatttaatacttggagcactttgaagactacagtggaaaaggaaataccttcacataaaaactacacaaaactattgtgacaagcttctttgtggtgtgtgcattcaactcacagggttgaacctatcttttgattgaccagttttgagactctctttttgtagaatctgcaagtgaatattaggaaatccttgtagcctatggtggaaaaggaaatatcttcacataaaaactacacagaagcattctgagaaacttctttgtaatgtgagcattcatctcacagatttgcacctttatttgattgagcagtttgaaactctctttttctgtaatccgccagtgtatatttggagcattttgtggcctatggtagaaaaggaaatatcttctcataaaaagtacacagaagcattctgagaaacttctctgtgatgtattcattctactcacagagttgaacctattttttgattgagcagttttgtaattatctttttcaataatctgcaagtggatattgggagtcctttgtggcctaataaggaaaaggaagtatcttcacacaaaaactacacagaagaattttgagaaacttctttgtgatgtgtgcattcatctcagagtgttcaacgtttcttttgattgagtcgtttggaaacactctttttgcagaatgtgcaagttgatatttgtagcgctttgaggcctccagtggaaaaggaaatatcttcacataaaaactacacagaagcattctgagaaatttctctgtgatctgtgcattcaactcacagggttgaatctatcttttgattgaccagttttgagtctctctttctgtggaatctgcaagtggatatttaaagccctttgtggcctatggtggaaaaagaaatatcatcacataaaaactacacagaagcattctgagaaagtttttgtgatgtgtgcattcatctcacggagttgagcctatcttttgattgggcagttttgaaactctctttttgaagaatctggaatgagtatttggaggcctttgtggcatatggtgcaaaaggaaatatcttcacataaaaactacacagaagcattctgagaaacttctctgtgatgtgtgcattcaactcacagagttgaagctacctttgattgaacagttttgaatctctctttttgtagaatctgcaagtggaagtttggagccctttgcggccaatggtggaaaaggagatatcttcaaatgaaaactacacagaaatattctgagaaacttcctgttgtgtgcattcatctcacacacttgaacctatcttttgattgagcagttttgaaaccctctgtttgtagaatctgaaagtggatatctggagcgctttggtgcctattgtgggaaaggaaatatcatcacaaaaaaactacacggaaacattctgagaaacttctttgtgatgtatgcattcatctcacagagttgaacctttctgtcgattcagcagttttcacattctttttgtagaatctgcaagtggatatttggagcgctttgaggcctatggtggaaaaggaaatatcttcacagaaaaattacacagaagcattctgaggaagttctttgtgatgtgtgcattcatctgtcaaagttgaacatttcttttgtttgagcagtttgggatcactctttttgtagaatctgcaagtggatatttggagcattttggagtctatggtgtaaaagtaaatatctacacataaaaactacacagaagaattctgagaaaattctttgtgatgtgtgcattcttctcacagagttgaatccatcttatcattgagcagttttgagacactctttttgtagaaactgcaagtggatatttggagtgctttgaggtctattgaataaaagaaactatcttcatataaaaactacacagaatcattctgagaaacttcattgtgatgagtgcattcataacacagagttaaacctatttttgattcagtagttttgaatctctctttttgtataatctgcaagtagatatttggagcccttttcagcctatggaggaaaaggaaatatcttgaaataaaaactacatggaagcattctgagaatcttctttgtgatgtgtgcattcatcccacagtgttaaacctttcttttggtagagcagttttcaaacactgtttttgaaaaatctgcaagaggatattttgagctctttgaggcctattgtggacaagtaaatatgttcacagaaaaactataaagaggcattctgagtaacttcatttgatgtgtaaattcactgaacagagatgaacctatcttatgattgagcagttttgaaacactctctttgtataatcttccagttgatatttgaagcgctttgaggtctattgtggaaaagaaatatcttcacataaaaagtgcatagaagcattctgataatcttctttgtgatgtgtgcattcatctcacagagttgaacctttcttttgttagagcagttttgaaacacggtttttgtaaaatctgcaagaggatattttgagcgctttgatgcctattgtggaaaagtaaatatttccacacaaaacctatgcagaggcattctgagtaacttctttgtgatgtgtgcattcatctcacagagttgaacctttcttttgattgagcagttttgaaacactctttctgtagaatctgcaagtggatattttgaacactttgaggactacagtggaaaaggaaatatcttcacataaaaactacacagaagcattctgagaaacttcttcatcatgtgagcattcaacacacagagttgaacctatcttttcatagagcagttttgaatctctctttttgtagaatctacaagaggatatttggatacctttgcagcctatagaggaaaaggaaatatcttcaaataaacactacacaggaggattctaagaaacttctttatgatatgtgcattcatttgacatagttgaatctttcttttgattgagcagttttgaaactcagtttttgtagaatctgcaagtggatatttggagccatttgaggcctactgtggaaaaacaaatatcttcacataaaaaccacacagaggcattctgagaaacttctttgtgatgtgtgcattcatctcacagtgttgaaattttcttttgattgagcagttttggttctctctttttctagaatctggaattggatatttggagcctcttgcggtctatggaggcaaaggaaatatcttcaaataaaaactacagagaagaattctcagaaatttctaggttctatttgcattcatctcacagagttgaacctttcttttgatggaggagttttgaaacactccttttgtagattctgcaagtggatatttggtgcgcactgaagtctattgtcgaaaaggcaatatcttcacataaaaactacacagaagcattctgagaaacttctttttgatgtgtgcattcatctcacatagttgaacctttcttttcattgagaagttttggaacacagtttttgtaggatctgcaagtggatatttggagagatttgaggtctactttgtaaaagcaattatcttcacataaaaactacacagaagcattctgagaaaattttgtgatgtgtgcattcatctcacacagttgaaacattattttgattgagcagttttgaaacactctttctatagaatctgcaagtggatattttgagcattttgaggcctatagtggaaaaggaaatatcttcacataaaaactacacagaatcattctgagaaactactttgtgatgtgtgcattcatctcacagagttgaatctatgttatggtttagcagttttcaaacactctctttgtagaatctacaagtggatccttggaacgatttgaggcatattgtggaaaaggaaatatgttcacataaaaactacacaaaagcattctgagaaagttctttgtgatgtgtgcattcaactcacagagtctaatctgtcttttgattgagcagtttttaaatactgtttttgtagaatctgcaagtggatattttgtggactttgaggcctattttggaaaaggaaatatcttcacataaaaactacacagaagcattctgagaaacttctttgtgatgtgttcattcaactcacaaacttgaacctatatttcgattgagcagttatggatttctctttttctaggatttggaagtggatattttgagtcctttgtggttcatggaggcaaaggaaatatcttcaaataaaatctacacagaagcattctgagaaacttctttgtgatgtgtgcattcatctcacagagatgaacctatcttatgactgagcagctttgaaacactctctttgcagaatcttcaggggaatatttggagtgctttgtggccagttgggtaaaaggaaatagcttcacataaaacctacacagaattattctgagcaactactttgtgatgtgcgtattcatctaacagagctgtatgtttcttttggttgagcagttttgaaacactgtttttatagaatctgcaagtggatatttggaatgctttgaggcctactgtggaaaaacaaatatcttcacgtaaaaaccacacagaagcattctgagaaacatctctgtgatgtgtgcattcatcccacagagttgaaagtttcttttgattgagaacttttgaaacacactttttgtagaatctgcaagtggatatttgaagccctttgcagcctatggaggaaaaggaaatatcctgaaataaatactacacagaagcattctgagaaacttctttgtgatgtgtgcattcatctcatagattggaacctatcttatgattgagcagttttgaaacactctctttgtagaatctgcaagtggaaacttggacgatttcaaccctatagtggaaaaggaaatatcttcacataaaaacttcacagaagcattctgagaaacttctttgtgatgtttgcattcgtctcacagagatgaatatttcttttgattgtgcagttttgaaacactgtttttgtagaatctgcaactggatatttggagccctttgcggtctatatgaaaaaaggaaatatcttcagatagaaactacacagaaacattgtgagaaacttctttgtgatgtgtgcattcatctcacagagttgaacttttcttttgatggagaagttttgaaacactctttttgtagaaactgcaagttgctatttggagccctttgcggcatatggtgaaacagggaataccttcacataaaaactacacagaaacattctgagaaacttctttgtgatgtgtgcattactctcacagagttgaaccattcttttgattgagcaggtttgaaacaatctctttgtagaatctgcaagtggatacttggaatgctttgaggcctattgtggaaaaggaaatatcttcacatagaaactacacagtagaattcagtgaaacttctttgtgatgtgtgcattcaactcacagagttgaacatttcttttgattgaccagtttggaaacattctttttgtagaaactgcaagtggatatgtggagccttttgtggcctaaggtggaaaaggaaatatcttcacataaaaactacacagaagcattctaacaaactaccttgtgatgtgtgcattcatctgacagagatgaacctttattttgattgagcagttttgaaaaactcttttgtagaatctgcaagtggatctttggagagctttgagcctattgcaaaaaagaaaatatcttcacataaaaactacacagaaggagtctgagataatttttgtgattgtgcattcatttcacctttcttttgactatgcagtttggaaatactcttttagggtgatctgcaagtggatatttgcagtgctaggaggcatattgaggaaaaggaaatatcttcccataaaaaatacacagaagcattctgagaaacttatttgtgatgtgtgcattcaactctcggagttgaacctatcttttgataagcagtattgaaacacttttttttttggaatctgcaggtggatatttggagcgctttgaggcctatggtgtaaaaggaaatatcttcacataaaaactacacagaagcattcaaagaaacttctttgtgatgtgagcattcaactcacagagttgaacttaactttttattgaggagctttgaaaatctctttttgtagaatctgcaagtggatatttagagccccttgctgcctgtggtggaaaaagaaatatcttcacataaaaacttcacagaagcattctgaaaaaaacttcttggtgatgtgtgcattcatatcacagagttcaacatttcttttgattgagctgttttgaaacactatttttgtagaatctgcaagtggatatttggagcactttgaggcctattgtagaaaaggaaatatcttcacatgaaaacaacacagaaacattctgacaaatttctttgtgatgtgtgcgttcatctcacagagttgaacttttcttttgattgagcagttttcaaacactgtttttgtagtatctctaagtggatattttgagcgcattggggtctatggtggaaaaggatatatcttcacataaaatctacacagaagcattctgagaaacttctttctgacgtgtgtattcaaaccacagatttgaacctatcttttgattgtacagttttcaaactctctttttgtagaatctgcaagtggatatttggaaccttttttggcctctggtggaaaaggaaataacttcacataaaaactacacagaagcattctgagaaacttcattgtcatgtgtggattcatctcagagtgttgaacctttcttttcactgagcacttttgaaacagtctttttgtagaatctgcaagtggatatttggagccccttgagtcctactgtggaaaagaaaatatctttacataaaaacatcacagatgcattctgagaaactactttgcaaggtgcgcattcatctcacatagttcaactttcttttgattgagcaattttgaaacacactttttgtagaatctgcaactagatatttggagtgcattgaggcctatggtggaaaaggaaatatcttcacttaaagctacacagaagcattctgaaaaacttctttgtgaaatgttcgttcaacacactgtggtgaacatttcttttcattgagcagttttgaaaaccactatttgtagaatctgcaagtggatatttgtagtgcttagaggcctattgtggaaaaggaaatatcttcacataaaaattacacagaagcattctgagaaacttgtttgtgatgagtgcattcagctcacagagttgaacctatcttttgatagagcaattttgaaactctctttttgtagaacctgcaagtggatatttggagccctttgtggcctatggtggaaaaggaaatatcttcacataaaaactacacagaagcattctgagaaatgtctttttaagtgttcattcatgtcacagagcgctttgaggcccattgtggaaaaggatatatcttcacataaaaactacacagaagcattctgagaaacttctgtgtaatatgtgcattcatctcccagagttgtaactttcttttgattgagcagtttggaaacactcttttagtaaaatctacaagtggatacttggagcgctttgaggcatattgtagaaatggaaatatcttcacataacaactaaacagaagcattctgagaaacttctttgagatgtgtgcatttaactcagagttgtatctatcttttgatagaggagttttgaaactctctttatgtagaatctgtaagggaatatttggagccctttgtggcctatggtgtaaaaggaaataccttcacataaaaactacacagaagcattctgagaaacttctttgtgttgtgtgcattcatctcaaagagatgaacctttaattcgattgaacagttttgaaacactctttttgtagaatctgcaagtggatatttggaacgctttggagagaatggtggaaatggatatatcttcatataaaaactacggaaaagcattctgagaaacgactttgtgatgtgtgtattcaaatcacagcgttgaaccattcttttgattgtgcagttttgaaactctttttgtggaatctgcaagtagatactcggaggtctttgcggagtattgtggaaaaggaaataactttgcataaaagctacacagacacattctgggaaacttctttgtgatgtgtgcattcaactcacagagttgaacctttcttttgattgagcagttttgaaacacactttttgttgaatctgcaagtggatatttggagaggtttgggacttatggtggaaaagtaaatatcttcacataaaaactgcacagaggtattctgagaaacttccctctgatgttcacattcagctcactgaattggacctttcctttgattgagcagttttgaaacactcttttgtagaatctgcaattggatatttgaagcgctttccagcctcgagtggaaaaggaaatatcttcacataaaaactagacagaaatattctgcgaaacttctttgtgatgtgtgcattcttctcacagagttgaacttttcttttgattgagcagttttgaaacactctttttgtagaatctgcaagtggatatttggagcacttccagtcctacggtgttaaaggaaatatcttcacatcaaaactagacagaagcactctgagaaacttctttgtgatgtgtacattcaactcacaggtttgaacctttcttttgattaagcagttttgaaacacactttttgtagaatctgaaggtggatattgggagcactttggggcctatggtgtaaaagaaaatatcttcaaataaaaactggacagaatcattctgagaaacaactttgtgatgtgtgcattcatctcactgagttgaacgtttcttttgattgagtagttttgaaacgcacatttgtagactctaccaggggatatttggagtactttggggtctacggtggaaaaggaaatatcttcacctaaaaactagacggaagcattgtgagaagcttctttgtgatgtgtgcattcaactaacacagttgaacctttcttttgattgagcagttttgaaacactctttttgaagaatctgcaagtggatatttggagcgctttgcggcctattgtggaaaaggatatatcttcaaataaaaactagaaagaagcactttgagaaacttctttatgagatgtgcattcatctcgcagacttgaacctttctttcgattgagcagttttgaaacactatttttgtagaatctgcaagggatatttgaagagatttgaggcctaatgtggaaaaggaaatatcttcacatgaaaactagacagaagcattctgagaatcttctttgtgatgtgtgcattcatcttacagagctgaaactttcttttgattcagcagttttgaaatactctgtttatggaatctgcttgtggatttttggagcgatttgagtcacgttgtggaaaaggaaatattgtcatatgaaaactagaaagaagcattctgagaaaattatttgtgatgtgtgcattcaactcacagagttgaaagtttcttttgattgagcagtttggaaacactgtttttgcagaatctgcaagttgatatttgtagcgcttggtggcctatattggaaaaggaaatatcttcacatatatacaagacggaagcattcagggaaactactttgtgatgtgcattcaattcaaagagctgaacatttaccctgattgagctgcttggaaagcatctttctgtagtatctgcaattggacattttgagcgctttgaggcctatggtggaaaaggaaatatcttcacataaaaactagacagaagcattctgagaaaattctttgtgatgtgtgcattcaactcacagagttgaacctttcttttgatcgagcagtttggaagcagtctttttgtaatatctaccagtggatatttggatcactttacatcatggattggaaaaggaaacatcttcacataaaaactagacaaaagcatactgagaaacttctttgtgatgtgtccattcatctcgtagagttaaatctttcttttgatagagcaggtttgaaacactctttttgtaggttctgcaagtgtatatttggagtgctctgtggccgatagtggaaaaggaaatatcttcacataaaaaaatacacagaagcactctgagaaacttctcggtgttgtgtgcagtcatatcacagacttgaaactttctttgatacagcagtttcaaaacgctctttttggagattctgaaagtagatatttggagagacttggggcctatggtggaaaaggaaatatcttcacataaaaactagacagaagcattctgagaagcttctttgtgatatgtgcatccatctcaaagagttgaacctttcttttgattgagcatttttgaagcactctttttgtagaatcttcaagtggatatttggaatgctttgtggcctgtggtggaaaaggaaatatcttcacataaaaactagacagaagcattctgagaaacttatttgtgatgtgctcattcaactcacagatttaaacttttcttttgattgagcagtttggaaacagtctttttgtagtacctgcaaatggatatttggagtgctttggggcctgtggtggaaaaggaaatatatacacacaaaaactagacagaaacattatgagaaactgctctgtgatgcgtgcattcatcaccagggttgaacctttcttttgattgaacagttttgaaacactctttctgtagaatctgaaggggatatttggaacgccttgcggcctatggtgaaaaacgaaatatcttcacataaaaactagacagatgcattctgagaaagtgctttgtgaggtgtacattcatctcacagagttaaacctttcttttgattgagcagttttgaaacactcttattgtacaatctgcaagtggatatttggagagtttgaggccactggtggaaaagcaaatatcttcacataaaaactagacagaaccattctgagaaatctctttgagatgcgtgcattcaactcacagagttggacctttcctttgattgagcagtttggaaacagtctttttgcagtatatgcaaatggatatttggagcactttcaggcctatagtaggaaaggaaatatcttcacataaaaactagacagaaaattactgagaaatttctcagtgatgtgtgcattcatctcacagagttgaaactttcttttgattgagcagtttggaaacactcttttagtagaaactgcaaggggatatttggagcactttgtggtctttggtagaaaaggatatatcttcacattaaaaatagacagaagcattctgaggaacttcttcatgatgtgtgcattcatctcagagagttgaacttttcttttgattgagcagctttgaaaaactctttctgcagaatctgcaagttgatatttggagtgctttggggcctatagtagaaaaggaaatatcttcacataaaactagacagaagcattctgagaaacttctttgtgatgtgtgcattaatgtcacagagttgaacctttcttttgtttgagcagttttgaaactctctttttgtagaatcttcaagtgaatatttttagcactttgaggcctgtggtggaaaagaaaacatcttcacataaaaactagtcagaagctttctgagaaacttctttgtgatgtgtgcattcaactcatggagttgaacctttcctttgattcagcagtttggaaacagtctttttgtagtatctgcaaatggatatttggagagctttgaggcctatggtgaaaaagaaaatatcttcacataaaaactagacagaagcattctcagaaacttctttgtgatgtgtgcattcatctcacagagctcacagagttgaacccttgtttttttttttttattgtactttaagttttagggtacatgtgcacattgtgcaggtaagttacatatgtatacatgtgccatgctggtgcactgcacccactaacgtgtcatctagcattaggtatatctcccaatgctatccctcccacctcccccgaccccaccacagtccccagagtgtgatattccccttcctgtgtccatgtgatctcattgttcaattcccacttatgagtgagaatatgcggtgtttggttttttgttcttgcgatagtttactgagaatgatggtttccaatttcatccatgtccctacaaaggacatgaactcatcattttttatggctgcatagtattccatggtgtatatgtgccacattttcttaatccagtctatcattgttggacatttgggttgtgaacccttgttttgattgagcagtgttgaaacactttttatagaatcagcaagtggatatttgttgcactttgagacctatggtggaaaaggaaatatcttcacagaaaaaccacaaagaagaattctgagaaacacctttgtggtgtgtggtttcatctctcatatttgaacctttctctttattgagcagtttggaaacaatctttttgtagtatctgcaaatgaatttttggagctgaggcctgtggtgaaaaatgaagtatcctcacataaaaaccagacagaaggattcctagaaagtgctttgtgatgtgtgcattaatctcacagatttgaaactttattttgattgaggaattttgaaacactctttgtgtagaatctgcaagtggatatttggagcgctttgaggcctatggtggaataggaaatatcttcacattaaaacaggacagaagcattctgagaaacttctttgtgttgtgtgcattcatttcacagagttgaaccattcctttgattgagcagtttgccaactgtcattttgtagaatctacagagggatatttgtgaacccattaatgcctatggggtgataggaaagatcttcatataaaaactagagagaaactttctgagaaacttctttgtgatgtgtgcattcatctcacagagttgaacttttcttttgattgagcagtttggaaacagtcttttttggaatctgcaaacagatatttttttttgctttgaggcctatggtggaaaaggaaatatcttcacataaaaactagacagaagcattctgagaaacttctttgtgatgtgtgcactcatctcacagacttgaagctttcttttgattgagcagttttgaaaaactctttttgtagaatctgcaagtcgatatttggagcgttttgtgtcctatattggaaaaggtaatatcttcacatagaaacttgacagaagcattctgagaaacttctttgtgatatgtgcattcatctcacaggatttaactttcttttgattgagcagtttggagcccatcgttttgtaggatctgtgaaggggtatttttgttcccattgaggcttatggggtaataggaaatatcttcacataaaaactaaacagaaaaattctgagaaaattctttgtgatatgtgctttcatctcacagagttgaaattttgttttgattgggcagtttggaatccgtctttttgtagaatctgcaagtggatatttggagggctttgagacctatggtgaaaaaggaaatatcttcacattaaaaatatacagaagcattctgagaaacttctttgtcttgtgtgcattaatttcgcagagttgaacctttgtattgattgagcagtttggaaacggtagttttgtagaatctgtagagggatatttttcagcctactgaggcctctgaggaaatagagaatatcttcagataagaaccagacagaagcattctgagaaacttccttctggtgtgtgcattcatttcacagagttgaacctttcttttgattgagcagtttggaaacagtgtttctgtagtaactgcaaatggatatttggagtgctttgaggcatacgtttaaaaaggaaaaaaaacaaaccaacaaccccttcaaaaagtgggcgaaggacatgaacatacacttctcaaaagaatatgtttatgcagccaaaaaacacatgaaaaaatgcccaccatcactggccatcagagaaatgcaaatcaaaaccacaaggagataccgtcacacaccaattagaatggcaatcattaaaaagtcaggaaacaacaggtgctggagaggatgtggagaaataggaacacttttactcagcgggtggcactgtaaactagtacaaccattgtagaagtccgtgtggtgattcctcagggatctagaactagaaataccatttgacccagccatcccattgctgggtatataaccaaaggactataaatcatgctgctataaagacacatgcacacatatgtttattgcggcactagtcacaacagcaaagagttggaaccaacccaaatgtccaacaatgatagacttgattaagaaaatatggcacatatacaccatggaatactatgcagccataaaaatgatgagttcatgtcctttgtagggacatggatgaaattggaaatcatcattctcagtaaaatatcgcaagaacaaaagaccaaacactgcgtattctcactcataagtgggaattgaacaatgagaacacatggacacaggaaggggaacgtcatactctggggactgttgtggggtggggtgagggggcagggatagcattaggagatatacctaatgctaaatgacgagttaatcggtgcagcacaccagcgtggtacatgtatacatatgtaactaacatgcacattgtgcacatgtaccctaaaacttaaagtataataataataaaataataaataaataaataaataaaaaggaaatatattcacataaaaacttgacagaagcattctgaggaacttctttgtcatgtgtgcattcatttcacagagttgaaactttcttttgattgagcagttttgaaacactcttttttcagaatctgcaactggatatttggagaacgttgaggcctatggtggaaaaggaaatatcttcacaaaaaatcagacacaaccattcagagaaacttctttgtgatgtgtgcattcaactccctgtgttgaagttttcttttgattgagtagttttaacaaactctttttgtagtatcagaaactggatatttgtagcgttttgaggcctatagaggaaaaggaaatatcttcacataaaacccagaaagaagcattctgagagaattctcttcgatttcagcattcatctcacagagttgaacttttcttttttgagaagtatttaatcactctttttgtagaatctgcaaggggatatatggagcactttgaggccttttgtggaaaaggtaatatcttcacataaaaatcagacacaagcattctgagtaacttctttgtgatgtgtgcattcaactacctgtgttgaaactttcttttgattgagcagttttaacgcactctttttgtagaatctgcaagtggatatttggagcactttgatgcctatgatggaaaaggaaatatcttcacataaaagctagacagaagcattctgagaatgttctttgtgatgtatgcattcatctcactgagctgaatctttcttttttgagaagtatttaaacactctttttgtagaatctgcaagtggatacttggagtgctttgaggcctttggtggaaaaagaaatatcttcacataaaaactagacagaagcattctgagaaacctctttgtgatgtgtacattcatctcacagagttgagcctttattttgatttagcagtttggaaacactctttttgtaggatctgcaagtggatatttggagtgatttgaggcctatagtggaaaaggaaataacttcatgtgaaaagtagacagaagcattctgaaaaacttcttagtgatgtgtgcattcatctcacaaagttaaacctatcttatgattgagcagttttgaaacactctttttgtggaatcttcaattggatatttggagtgcttagatgcctgtgttggaaaaggaaatatcttcacgtaaaaacaagcaaggagaattctgagaaagttttctttgtgatttgtgcattcatctcacagagctgaaattttcttttgattgagcagtttggacacagtctttttctcgcctgcaaaaggatatttagggtactttgaggcctatggtggaaaaggacatgtcttcccataaaaactagacagcagcattttgagaaacttctttgtgatgtgtggattcatctcacagagttgaacttttcttttgattgagcagttttgaaacactctttttgtacaatctgcaagtggatatttggagcgctttgaggtcattggtggaaaaggacatatcttccaataaaaactagacagaagtattctgagaaacattttgtgatgtgtgcattcatctcacagagttgaacctttctttttattgagcagtttggaaactgtatttttgtagaatctgcaagtggatatttggagcactttgaggcccatggtggaaaaggacatatcttcccataaaaactagacagcagcattttgagaaacttctttgtgatgtgtggattcatctcacagagttgaagctttcttttgattgagtagtattgaaacactcttgtggaatctccaattagatacttggagcgctttgaggcctatggtggaaaaggaaatatcttcacatgaaaactacacagaagcattctgagaaatttgtttgtgatgtgttcattcaacacacagagttgaatctttcttttgattgagcagttttgaaacacacttttttaggatctacaagtggatatttggagcgctttgtggcctattgtggaaaaggatatatcttcacataaaaagtatggagaagcattctgagaaacttctttgtgatgtgtgcattcatctcacagagttcaacctttcttttgattgagcagttttgaaacgctctttttgtagagtgtgcaagcggatatttggagctctttgaggcttatggtggaaaaggaaatatcttcacataaaaactacagagaagcattctgacaaagttctttgtgctgtgtgtgttcaactcacagagttgaacctttctttcgattgagcagttttgaaatgccctttttttagaatctgcaagtggatattttgagtgctttgtggcctctgttggaaaaggaaatatcttcacataaagtagacagaagcattctgagaaacttccttgtgatgtgtgcattcatctcacagagaggaaactttcttttgattgtgaagttttcaaacactctttttgtataatctgcaagtggatatttggaggtctttgtggcctataggggaaaaggaaatatcttcacataaaaactacagagaagcattctgacaaagttctttgtgctgtgtgtgttcaactcacagagttgaacctttcttttgattgagcagttttgaaatgccctttttttggaatctgcaagtggatattttgagtgctttgtggtctctgttggaaaaggaaatatcttcacataaagtagacagaagcattctgagaaacttccttgtgatgtgtgcattcatctcacagagttgaaactttcttttgattgtgaagttttcaaacactctttttgtaggatctgcaagtggatatttggaggcctttgtggcctataggggaaaaggaaatatcttcatataaaaattagacagaagcattctgagaaacatctttgtgatatatgcattcatctcacagcgttgaaattttctttttattcaccacttttgaaacactctttttctacagtcggcaagtggatatttgtagtgctttgaggcatatggtggaaaatgaaatattttcacaataaaattagacagaaacattctgtgatacttctttgtgatctgtgccttcatatcacagagttgaacctttctattgatagagcagttttgaaacactctttttgtaaaatctgccaatggatatttggaacactttgaggcctatagtggaaaaggaaatatcttcacataaatagtagacaagcattctgagaaacttctttgtgatgtgtgcattcaactcacagaatggaacccttattttgatagagcagttttgaaagactccttttgtataacctgcaattggatatttcgagcgctatgtggccttaagtggaaaaggcaatatcttcgcataaaaactagacagaagcattgtgagaaatttctttgtgatgtgtgcattcatctcacagagttaaagctttcttttgattgagcagttttgaaacactctttttgtagaatctgcaagtggatatttggagcactttgcagtctatagtggaaaaggaaatatcttcacataaatatttgtcagaatcattctgagaaacttcttcatgtgtgcattcatctcacagagttcaacctttcttttgattgagcagttttgaaacactctttttgtagtatctgcaagggatacttggagcagtttgaggtctatggagtaaaaggaaatatcttcacctaaaaactagacagaagcattctgagaaacttctttgtggtgtgtgcattcatatcactgtcttgatccattcttttgactgagcagttttgaaacactctttgtgtagaatctgcaagtggatatttggagtgctttgaggcctattgtggaaaaggaaatgtcttcacataaaaaccagacagaagcatactgagaaaattatttatgatgtgtgcattcatctcacagagctgcacctttcttttgattgagcagttttgaaacactctttttatagagtgtgcaagctgatatttggagcactttgatgcttatggtggaaaagcaaatatcttcacataaaaactccagagaagcattctgacaaagttctttgtgctgtgtgcattcaactcacagagttgaacctttcttttgattgagcagttttgaaacactctttttgcagaatctgcaagtgaatattttgagcgctttgtggcctctgttggaaaaggtaatgtcttcacataaactagacagaagcattctgagaaacttcttcgtgatgtgtgcattcatctcacagagttgaacctttcttttgattgagcagttttgaaacactctttttgcagaatctgcaagtggatatgtggagcactttgaggccatgatacaaaaggaaatatcttcacataagaactagacagaatcattctaagatacttctttgtgatgtgcacattcaactcacagagttgaacatttcttttgattgagcagttttgaaacactctttttgtagaatcagcagttggatatttagagcgctttgaggcctatggtggaaaaggaaatatcttcacataaaaactagacagaagcattctgagaaacttttttgtgatgtgtgcattcaactcaccgagttgaacagtctttttattgagcagttaggatacattcttttcgtaccatcttcaaatttgtatttggacagctttgaggcctatagtggaaaaggaaatatctgcacataaaaattagacagaagcattcggagaaacttctttgtgatgtgtgcactcatctcacagagttaaaccattcttttgattgagcagttttgaaacactctttttgtataatctgtaagtggatatttggatcactttgaggcatatggtggaaaagaatatatcttcccataaaaactagccagaagcattctgagaaacttctttgtgatgtgtgtattcagctcacagagttgaacctttattttgattgagcagttctgaaacacactttttgtaggatctgcaattggatatttggatcgctttgcagcctcttgtggaaaaggaaatatcttcacataaaaactacagggaatcattttgagaaacttctttgtgatgtgtgctttcagctcgcagagttgaacttttcttttggttgagcagttttgaaacactctttttgtagaatctgcaagtggatatttagagcgctttgacgcctatggtggaaaaggaaatatcttcacatgaaaagtagacagaagcattctgagaaacttctttgtgttgtgtgcattcatctcacagagttggactttctttttgttgagcagtttggaaacactctttttgtagagtctgccattggatatttagagcgctgtgaatcctatggtggaaaaggtcatatcttcacataagaactataaagcaggttttctaaaaacaacattgtgatgtgtgcattcatctcacagaggtaagtgtttcttttctcctatcagtctggaaagtctgttcttgtacaatctcaaagggggtagttttgagcactttgaggcctattgtaacaaaggaaatatcttcacattcaaagtataaagaaagtttctgagatacttctttgtgatatgtgcattcatctcacagatttgcgcgtctcttttaattcagccgtttggaaacagtctttttgaagaatctgcaaacggatatttgtgagcactttgaggcctatgcaggaaaagaagtatcttcacagaaaactataaagaaggtttctgagaaactgttttttgatgtctgcattcatcttgcagaggtaaacaattcttttctttgatcagttgggtatctctgttcttgtaggatctgctaagggatatttttgagtgcctagacccctatggtgaaaaagatattgtcttcacataaaaactagacagaggcctactgtgaaacttcttggtgatgtgtgcattcatctcacagaattgaaactttcttttgattaagcagtttggaaacgtctttttgtggaatccgtaaagggaaatttctgatcactttgaggcctatggtgaaagagaaagtatcttcacataaaaactagactaaagatttctgagaaactgctttgtgatgtatgtattcatctcacagagttcaacaattcttttgatcgagcagttgggaaaccgtctttttgtagaatctgcaaagggatatttgtgagcacttagaggtctatggttaaaaggaaatatcttcacataaaaactataaagaaggtttgtgagaaacttctttatgatgtgtgcattcatctcacagagttgaaccactcctttgactcagcggtttggaaacagtcttttttagcatctgcaaaggtatatttttgagcactttgaggcccatggtgaaaaaggaaacactttcacataaaaacaagatagaagctttctgagaaccatctttttgatatgtgcattcatcccacagaggtgaacctttcttttgatgagcattttggaagcagtatttggtagaatttccaaagggttattagttagtgttttgtgtcctatgttggaaaaggaattatttttaaataaaaactagacagaatatttctgagaaactgccttgtgatgtgtgatttcatctcacagaagtaaccatttcttttcattgaacagattggaaattctgttcttgtaaaatctgcaaagggatatttgttagcactttgaggcctatggtaaaaaaggaattatcttcacataaaaactagacggaggctttctgtgaaacatcttggagatgcgagaatttgtctcacagagttgaaacattcttttggttgggcagtttgtaaacagtattttggtagaatctgcaaaggaatatttgtgatgctttgaagcctatggtgaaaacgaaatattttcacatgaaaactagagagaagctttctgagaaacctccttgtgatgtgtgcattcatctcacagatttgaaactttctttggattgagcaatttggaaacagtatttttgtagaatctgtaaaggcatatttttgagtcgtatgaggcctatgatgaaataggaaatatcttcacataaaaactagacagaagctttccgagaaacttctttatgatgtgtgcattcatctcgtagagttcaaccattcttttgattgaacagtttggaaacactctttttgtagaatctgcaaagggatatttatgagtgctttgagtcctatggtgaaaaaggaaatgtattcacataaaaagtataaacaaggtttctcagaaacagctttgtgatgtatgcattcatctcacaaaagtaaacgtttcttttctctgatctgtctggaaactgttcttgtagattctgcaaagggatatttgtgagtattttgaggcctatggtgaaaaaggaaatatcttcacataaaaattagagagaggttttctgagaaacctctttgtgatgtgggcattcatctcacaaagttgaaacttacttttgattgatcagtatggaaaccatcttttgtggaatctgcaaagggaaatttatgagagctttgaggccaatgttgaaaaaggaaatatatttatataaaaggcataaagaaggtttcttagaaacagctttgtggtgtgtgcattgatctcagagaggtaaacgtttattttctttgatcagtctggaaactctgttcttgtagtatctgcaaagggatatttgtgagtgctttgaggcctatgatgaaaaaggagatatcttcacataaaaactagacagaagctttcttagtggcttctttgtaatgtgtgcaatcatctcacagaattgaaccattcttttgattcagcagtctggaaacagtatttttgtagaatctgcaagggatatttgtcacgacttcgagtgctatggtgaaaaaggaaatatcttcacataaaaaatggacagaagatttctgagaaacctctttgagatgtgtgcatccatctcacagagttcaaccatttatttgattgagcagttgggaagcagtctttttgcagaatctacaaagggatattgctgagcaatttgaggcctgtgttgaaaaaggaaatatcttcacataaaaactataaagaaggtttctgagaaacttctttgtaatgtatgcattcatctcatggagttgaactattcttttgattgagcactttggaaacaatctttttgtagaatctgcaaaaggatatttttgagccctttgagtcctagggagaaaaaagaaatatcatcacataaaaagtataaagaacgtttctgagaaaaagttttgtgatgtgtgcattcatctcacagagaaaaacgtttattttgtttgatcagtctggaaattctgttcttgtagaatctgctaagggatatttttgagcagatggaggcctatggtgaaaaaggaaatgtcttcatataaaaattagacagaagcctcctgcgaaacttcttagtgatgtgtgcattcatctcacagagtagaaactttcttttcattgagccatttggaaacagtctttttgtagactctgcaaatggatatttggagcactttgaggcctatggtgaaaaaggaaatatattcacataaaaaccagactgaaagtttctgagaaacttctctgagatgtgtccattcatctcacaaagttcaataattctttttattgagcggtttggaacaatctttttgtagaatctgcaaagagatatttgtgagggcttgaggcctatggtgaaaaaggaaatatcttcacggaaaaactataaagaaggtttctgagaaacttctttgtgatgtgtgcgttcatctcacacagttcaacctttcttttgattgagcagtttggaaacagtctttttaaatattcttccagtggatacttgtgagcaccttgaggctcctggggaaaaaggaaacattcacttaaaaacttaatagaagctttctgagaaactactttttgacgtgtgcattcatctcacagagttgaacctttctcttgatgagcagtgtggaaacaatctttttgtagaatctgcaaaaggacaattttgagtgctttgcatcctgtggtggaaaaggagataccttcacataaaaactagacagaatgtttctcagaaactgctttgtgatatgtgcattcatctcccagatgtgtctgtttcttttcattgagaagattggaaactcttttcttgtaagacctgcaaagggatatttgtgagccctttgaggtgtatggtgaaaaaggaaatatcttcacataaaaactacacagaagctttctgagaaacatcctcgtgatgtgagcattcacctcacagagttgaaacattcttttgattgagccatgtgtagagagtctttttgtagaatctgcaaagggatatttgtgaatgctttgaggcctatggtgaaaaaggaaatatcttcacataaaaactagagagaagctttctgagaaacctctttgtggtgtgcatacaactcacagagttgaacctttcttttgattgagcaatttggaagaagtatttttgtagaatctgtaaagggatatttgtgagcactttgaggcctatggtgaaaaactagacagaggcattctaagaaacttcttcatgatgtgtgcattcatcacacagagttgaacctttgttttgattgagccgtttggaaacagtctttttgtagactctgcaaacggatatttggagcactttgaggcctatcgtgaaaaaggaaatatattcacataaaaactagactgaaggattctgagaaacttctttgagctgtgtgcattcatctgacagtgttcaataattctttttattgagcagtttggaaacagtctttttgtagaatctgcaaagggatatttgtgagggctttgaggtctgtgttgaaaaaggaaatatcttcagggaaaaaccataaagaaagtttctgagaaacttctttggatgtgtgaattcatcacactgagttgaaacattctttggattgaacagtttgcaaacagtctttttgtagaatctgcagagggatatttgtagcgctttgaggcctatggtgaataaggaaatatcttcacataaaaactagacaaaagttttctgagaaactttttgtgatgtgtgcatttatctcatagagtttaacatttgttttgattgagcagtctggaaacagctttttgtacaatctgcaaagggatatttaggagtaagttgaggcctatggtggaaaaggaaatatctaacataaaaactagaaagaagcattctgagaagctcctttaagatatgtgtactcatctcacagaggtaaacatttcttttcattgagcagtttgtaaactctgttattctagagtctgcaaaggggtatttttgagagctttgagacccatgttgaaaaaggaactatcttcacataaaaactagtgagaagcttgctgagaaactactttctgatgtgtgcattcatctaacagagttgaaactttcttttgattgagcagtttggaaacagtctttttgtagattctgcaaaggtatatttgggagtgcattgaggcctatgttcaaaaaggaaacatcttcacataaaactgagaaggaggttttctgagaaacttctttgtgatgtgcacattcgtctcacagggttgaaccattctgtttattgagcagtttggaaacaatctttttgtagaatctgcaaagggatatctgtgagtgcattgaggcttatggtgaaaaaggaaatatattcacattaaaagtagaaagaagttttctgagtaactcatttgtgacatgtgcatttatcacagagaagtaaaaatttcttcccattgagcagttagtttttgtgaagatatttccgttttcaccatagacctcaaaaggcctacatatatccctttgcagattctacaaaaagactatttccaaactgctcaatcaaagaaagcttccactctgtgagatgaatgcacacatcacagagaagtttctcaaaaagtttctgtctagttttatttgttgatactccctttttcaccataggcctcaaatcgctcatgaataactctttgcagattctacaagaagactgtttccaaactactcaatcaaaagaaagcttcatctctgtgaggtgaatgcacacatcataaagaagtttctcagaaagcttctgtctagtttttatttgaagatgtttcctttttcaatataggcctcaaagtgctcacaaatgtccctttacagattttaaaaaaagactgttaccaaactgctcaactgaaacaaagcttcaactctttgagatgaatgcacacatcacaaagaagtttctcagaaagcttccgtccagtttttatgtgaagatatttcctttttcaccataagtctcaaagcattcaaattatcactttgcagattctacaaaaagacattttccaacctgctctatctaaagaaaggtttaactctgtgagaagaatgcacacatcaaaaataagtttctcagaatgcttctgtctagtttttatctgaagacatttcctttttcaccatagaccaaaaagggatcccaaatatccctttgtacattctacaaaggactgtttccaaactgctcaatccaaagacaggttcaacttttgggatgaatgcacacatcacaacgaagtttctcagaaagcttctgtctagtttttgtgtgaagatattacttttttcaccataggcttcaaagggctcacaaatatcacaaagcagattctacaaaaagactctatccaaactggtcaaggaaaagaacacttcaaatctgtgagatgaatgtgcacatctcaaagaattttctcagaaagcttctgtctagtttttatgtgaagatatttccgttttcaccatagacctgaaaccgcctatatataacccttttcagattctacaaaaagactgtttccaaacggctcaatcaaagaaagtttctactctgtgagatgaatgcacacatcacagggaagtttttcagaacgtttctgtctagtttttatttgtcgatactccctttttcaccataggccttaaactgctcataaataaccctttgcaggttctacaaaaggactatttccaaactgctcaatcaaatgaaatttcagctgtgtgagatgaatgcacacatcaaaaagaagtttctcagaacgtttctgtctagtttttatgtgaagatacttctttttcaccataaacctcaaagcgttcccaaattttcctttgcagattctatgaaaagactgtttccaaactgctcaatcaaaagaaaggttcaactttttgtgatgaatgcagacatcacaacgaactttctcagaaggcttctgtctagattttatttgtggatatttcctttttcacaataggcctcagaaagctcacaaatatcactttgcatattctacaaaaagactgtttccaatctgctcaatgaaagaaaattcaactctgtgagatgaatgcatgcatcacaaagtggtttctcagaatgtttctgtctagtttttatatgaagatatttcctttttcatcacatgcctcaaaccattcaaaaacatccctttgcagattctccaaaaagactttttacaaactgctcaatcaaaagaaagattcaagtctttgagatgcatacacccattacaaagaagtttcccagaaaacatgagtctagtttttatgtgaagatatttcctttttcaccataagcctcaaagcattcacaaatatcactttgcattttctatgaaaagactgtttccaaactggtcaatcaaaagaagtttcaaccctgtgagatgaatgcacacatcacaaagaagttcttcagaaagctactgtctacattttattttttgatatttcctttttcaccattggattcaaaccactgaaacatatcactttgcagattctacaaaaagactttttccaaactgcccaatcaaaagaaaggctcaactctgtgagatgaatgcacacatcacaaggaagtttctcagatagctcttattattttgagatacgtcccatcaatacctaatttattgagagtttttaacatgaggggctgttgaattttgtaaaggccttttctgcatctattgggataatcatgtggtttttgtctttggttctgtttatatgctggattacatttattgatttgcgtatattgaaccagctttgcatcccagggatgaagcccacttgatcatcgtggataagcttcttgatgtgctgctggattcggtttgccagtattttattgaggatttttgcatcagtgttcatcaaggatattggtctaaaattctcttttttggttgtgtctctgcccggctttgttatcaggatggtgctggcttcataaaatgagttagggaggattccctctttttctattgattggaatagtttcagaaggaatggtaccagttcctccttgtaactctggtagaattcggctgtgaatccatctgatcctggactctttttggttggtaagctattgattatggccacaacttcagagcctgttattggtctatttagaaatccaacttcttcctggtttagtcttgagagggtgtatatgtcaaagaatttatccatttcttctagattttctagtttatttgcatagaggggtttgtagtattctctgatggtagtttgaatttctgtggggacggtggtcatatcctccttatcattttttattgcatctatttggttcttctcttttttcttctttattagtcttgctagtggtctatcaattttgttgatcctttcaaaaaaccagctcctggattcattaattttttgaagggtttttttgtgtctctatttctttcagttctgctctgattttagttatttcttgccttctgctagcttttgaatgtgtttgctcttgcttttctagttcttttaactgtgatgttaggatgtcaattttggatcttttctgctttctcttgtgggcatttagtgctaaaaatttccctctaaacactgctttgaatgtgtcccagagattctggtatgttgtgtctttgttctcattggtttcatgctgctataaagacacatgaacgtgtatgtttattgaggcactattcacaatagcaaagacttggaaccaacccaaatgtccaacaatgatagactggattaagaaaatgtggcacatatacacatggaatactatggagcaataaaaaatgatgagttaatgtcctttgtagggacatgaatgaaattggaaatcatcattctcagtaaactatcacaaggacaaaaaaccaaacaccacgtgttctcactcataggtgagatttgaacaatgagaacacatggacacaggaaggggaacatcacactctggggactgttgtggggtggggggaggggggagggatagcattaggagatatatctaatgctaaatgatgagttaatgggtgcaggacaccagcgtggcacatgtatacatatgtaactaacctgcacattgtgcacatgtaccctaaaacttaaagtataataataataaaataaaataaaataaaataaagtgcacatcacaaagaagtttctcagaaagtttctttttagtttttatgtgaagatatttcctttttcaccatagtccacaaagtgcaccaaatatcttttgcagatgattgtacaaaaagagtttctccaaactgctcaatcaaaggaaagtttcatctctgtgagatgaaagcacaaatcacaaagaagttactcagaatgcttctgtctagtttttaaatgaaggtatttcctgttacaccataggcctcaaagggctcacagatatccttttgcagattctacaaaaacactgttacagaattgctcaatgaaaagtaagtttcaactctgtgagatgaattcacacctaaaaaaagaagtttctcagaatgcttctgtctagtttttatgtgaagatatttctttgtcaccataggcctcaaaccgctcagaaatatccctatgcagatgttacaaaaagactgtttccaaactgctcaatgaaaagaaagattctactctgtgagatgaaagcacatatcacaaagaattttctcagaaagtttttgtctagcttatatgtgaagacatttcctctttcaccataggcctcaatgggctcaaaaacgtctcttttcagatactacaaaaggcctctttccaaactgctcaatcaaaagaaagtttcaactctgtgagatgaaagcacacatcacaaataagtttctcagaatgtttgtttagttttatgtgaagatatttcctgtttcactgtaggccataaatgactcacaaatatccctttgcagactctacaaaaagacagtttgcaaacagctcaatcaaaaacaaaggttcaactatgtgagacgaatggacacatcacaaagaagtttctcagaaggcttctgcctagtttttatgtgaagatatgtctttttcaccataggcctcaaatggctaagaaatatccctttgcagattgtacaaaaagactgtttccaaattgctcaatgaaaagacaggttcaactctgtgagataagtgcacacatgaaaaagaagtttctcagaatgcttctgtctagtttttatctgacatagttatttttcaccataggcctcaaatggttcagaaatatccctttgcatattgtactaaaagactgtttccaaactgtcaaatgcaaagaaaggttcaactctgtgagatgaatgcaaacatcaaaaagaagtttctcagaaagtttctgtctagtttttatgtgaagataattccttcttcacaataggcctcaaagtgctccaaatatccattttcagattacacaaaaagactgtttccaaacggctcaatcacaaaaaaagttcaactctgtgagatgaatgcacacatcataaagaagtttctcagaatacttctgtctagttttgatgtgaagatatttcctttttcaccataggccttaaacggctcccaaatatccctctgcagatactacaaaaaggctgcttgaaaactgttcaatcaaaggaatccttcatctctgtgagatgaaaccacacatcacaaagaagttcctcataatgcttctgtctggtttttatgtgaagatatttcatatttcaccataggcctcaaagagctcacaaatatccctttgcagactctacaaaaagactgtttcaaactgctccatgcaaagaaaggttcaactctgtgagacgaatgcacacataaaaaagaagtttctcacaattcttctgtttagtttttatgtgaagatattcctttttcactataggcaccaaaccgttcagaaatatccctttgtagactacaaaaagactgtttccaaactgctcaatcaaaagaaagtttcaaacctgttagatgaaagcacacatcacaaagaagtttctcagaatacttctgtctagtttttatgtgaagatatttctttttcaccataggcctcaaacccctcagaaatatccctttgcagattgtagataaagactgcttcctaactgctcaatcaaaagaacagttcaactctgtgagatgaaagcacacgtcacaaagaagtttctcagaaatcttctgtctagtttttatgtgaagatatttcccttctaatgataggcctcaaagcaatccaattatcaatttgcagattctacaaaatactctttccaaactgctcaatcaaaagaaattttcaactctgtgagatgaaagcatacatcacaaagaagttcttcagaaagtttctcactagattttatgtgaagatatttagtttttcaccacaagccacaaagtgctccaaatatccttttgcagatacttcaaaaagagtttttccaaactgctcaatcaaaacaaagtttcaactctgtgagaggaatgcaaacatcacaaagaagtttctcaaaatgcttctgtctagttttcctttgaagatatttcccatttcaccatgggcctcagtgggctcacatatatcctcttccaaattctacaaaaagactgtttctgaatttctcaatgaagagaaaggttcaactctgggagatgaatgcacacatgaataataagtttctcagaatgcctctgtctagtttttgtgttaagatatttgtttttcaccgtaggcctcaaacttctcagaaatatccctttgtagattgtacaaaaagatggtttccaaactgctcaatgaaaacaaaggttcaacactgtgacatgaatactcacatcacagagaagtttttcagaaagcttctgtttagtttttaagtgaaaatatttcctttttcaccataggcctcaaagcaatccaaatatccttttgcaaactctacaaaaagagagtttccaaactgttcaattaaaaaaaagattcaaatctgtgagaagaaagcacacatcatgaagaagtttcccataatgcttctgtctactttttttgtgaagatatttcctatatcaccataggcctcaaagatctcacaaatatccctttgcagactctacaaaaagacagttttcggactgctaaatgaaaagaaaggttcaattctgtgagacgaatgcacacatattaattagtttatcataatgcttctgtctagtttttatgtgaagatatttctttttcaccataggcatcaaaccgttcagaattatccctttgtagattgtacaaaaagactgtttccaaactgctcaatcaaaagaaaggttcaaaccggtgagatgaatgcacacataaaagaggagtttctcagaaatcttctgtcttgtttttatgtgaagatattacctttctcaacataggcctcaaagcaatccaaatatccatttgcagattctataaaaagactgtttccaaactgatcaatcaaaagaaatttttacctctctgagatgaaagcacacatcacaaaaatgttactcagacagcttctctctagtatgtatgtgaagatacttcctatttcacctgaggtcataaagggctcagagatatccctttgaaggttttacaaaaagtctgtgtccaaactgctcaatcaaaagaaaggttcaactctgtgagatgaatgggcacatcacaaagaaatttcttggaatgattctgtctagtttttatgtgaagatatttctctttcaccataggcctcaaacggatcagaattatccctttgcagattgtacaataagcctctttccaacctgctcaatcaaaagaaatgttcaactctgtgagatgaatgcacacatcacaaggaagtttctcagaaaacttctgtttagtttttatgtgaagatatttcgtttttcaccatgggcctcaaaagctctccaaatatccatttgcagattttagaaaaagagtgtttccaaactcctcaatcaaaagaaagtttcaattctgtgatatgaaagcacacatcacaaagaagattcttagaaagcttctgtctagtttttatgtgaagatatttcacattgcaccatagtactcaatgggctcagaaatatccctttgcagattctacaagaggactgtttccaaactactcaatccaaagacagtttcaactatgtgagatgaatgcacacatcacaaagaagtttctcagagtgcttctgtctagtttatatgtgaagaaaattcctatttcaccataggcaataaagggctcacaaatattttttgcagattctacaaaaatacgtatccaaagtgctaaataaaaagaaagtttcaactctgttagattaatggacacatcaaaaagtagtttctcagaaaacttctgtttagtttttacgtgaagatatttcctttgtcaccattggcctcaaagtgctctgaatatccatttacagatttcactaaaagagtgtttccaaactgctgaatcaaaagaaagttttaactctgtgagatgaaagcacacatctcaaagaactttctcagaaagctttggtctagttttcatgtgaagatatttccagtttcaccacaggcctcaaagtgctaagaaatatacctttccagattctaaaagacgaccatttccatactgctcagtcaaaataaaggttaaattctgtgaggtgaatgcacacatcagaatgaagtttctcagaattctcctgtctagtttttatgtgaagatatttactatttcactataggcttcaaatgtctcaaaaatatccctttgcagattctacaaaaatatggtttccaaagtgctgaattaaaagaaaccttcaactctgtcagatgaatggagacatcacaaagaagttcctcagaattcttctgtctattttaaatgtgaagatatttcttttttcaccatagacctcaaatggctcagaaatatgcctttgcagattgcagaaaaagactgtttctaaactgctcaaacaaaataaagtttcaacactgttagatgaatgcgcacatcacaaagaagtttctcagaaagcttctgtctcgtttttatgtgaagatatttcctttttcaccataggccttaaaccgctcacaaatatccttctgcagatactataaaaagactgtttccaaactgctccatcaaaagaaaagttcacctctctgaggtgaatgcatacatcacaaagaattttctcagaattcttctgtctagtttttatgtgaagatatttccattttcacattaggccacaaagcactccaaatatccatttgcagattatacaaaaagactgtttacaaactgctcaatcaaaagaaatgttcaactctgtgagatgaaagcacacatcacaaagaagtttctcagaaatcttctgtctagtttttatctcaagataattcctattttgccataggaatcagtgggctcacaaatatccctttgcagattctacaaaagttctgtttccaaactgctcaatcaaaagaaacgttcaacattgtgagatgaatgcacacatcacaaagaagtttctcggaatgcttctgtctggttattatgtgaagataattcctttttcaccacagtctttaaaccactcaaaaatatccctctgcagatactacaaaaagactgtttccaaactggtccatatagaaagtttcaactctgtgagatgaatgcactcatcacaaagaattttctcagaattcttctgtctagtttttatgtgaagatatttcctttttcaccatagttctcaaattgctccaaatatccatttgcagattctacaaaaacagtgtttccaaactggtcaatcaaaagaaaggctcaactctgtgagacgaaaacacacatcacaaagtttctcagaaagcttctgtctacatttcatgtgaaagtatttccttttgcaccataggccttaaaccgctcacaaatataactccacttatactaccaagagactttctccaaattgctaaatcaaaagaaagtttcaactctttgagaagaatgcacacatcacaaagaagtttctcaaaatgcttctgtctagttttcatgtgaagatatttatttttcaccattggcctcaaactgctcagaaatatccctttgcattttgtacaaaaagactgtttccaaactgctcaatgaaaagaaatggtcaactcttagagatgaatggaaatgtcacaaagagttttctcaaaaagctactgtgttgtttttatgtgaggatatttcctttttcactctaggccttaaaatgctccaaatatacatttgcagattctataaaaagactctttccaaactgctcaatcaaaataaaggttcaaatctgtgagatgaaagcccacgtcacaaagaagtttctcagaaagtttatatctcgtttttatgtgaagatatttcctatttcacctttggcctcaaagggatcacaaatatccctattcagatattacaaaaaactgtttccgaactgcttcatcaaaagaaaggttcaactctgtgagaacaatgcacacataaaaaattagtttctcagaatgcttctgtctagtttttatgtgaagatattactttttcaccataggtctcaaaccgcaaacaaatattcctttacagattgcacaaaaagtatgtttccacactgctcaatgaacagaaaagtacaactcagtgagatgaatgcaaacatcacaaagagttttctcaaaatgcttctgtctaggttttaggtgaagatatttactttttcaccataggcctcaaaccactcacaaatatccctttgcagattctacaaaatgacttgttgccaaactgctcaatgaaaagcaaggttcaaatctgtgagatgaaagtacacatcacaaagaagtttctcagaaagtttctgtctagtttttatatgcagatattttctttttcacaataggcctcaaagcacttcaaatatccgtttgcaagttctacaaaaagagtgtttccaaactgctcaatcaaaagagaggttcagctctgtgaggtgaaagcataaaacacaaagaagttttacagaaagcttctgtctagtttttatatgaagacatttcctattataccataggccctctatgtgctcacaaacatccctttgcagattctacaaaaggactctttccaaactgctcaatccaaggaaagtttcaactctgtgacatgaatgcacacatcacaaagaagtttcacagaatgcttctgtctagtttttatgtgaagacatttcttgttcaccataggcctgaaatgctgcaaatatccatcttcagattctacaaaaagacggtttccaaaatgctcaatcaaaagaaaagttcaactctgttagatgaaagcatgcatcacaaagaagtttatcagaaagcttctgtctagtttttttgtgaagatattccctatttcaccataggcctgaaagggctcacaaatatccttctgcatattatacaaaaagactgtctccaaactgctcaatcagaagaaaatttcaactatgtgtgatgaatgcacacattacaaagaagtttctcagaatgcttttgctagtttttatatgaagatatttctctttcacagtaggcctcaaatggctcagaaatatccctttgcagattgtacaaagagactgtttccaaactgctcaatcaaaagaaagtttcaacactgtgagatgaatgcacacatcacaaagaagtttctcagaatgcttctgttaagatttcatgtgaagatatttcctttttcaccataagcctcaatgggctcagaagtattactttgttgattttacaaaaggtctgtttagaaaactgctcaatccaaagaaaggttcaactctgtgagatgaatgcacacatctcaaagaagtttctcacaatggatttgccgaggttttctgtgaaggtattcccttttccaccataggcctcaaaccgctcacaaatatccctctgcagatacaacaaagggactgtttccaatctgctcaatcaaaagataggctcaacaacgtgagatgaatgtacacgtcacaaagaagtttctcagaatgcttctgtctagttttaatgtgaagatatttactttttcaccataggcctcaaaacacgcaaaacatccatttgcaaattccacaaaaagactgtttccaaactgttcaatcaaaagaaaggttcaactctgtgaggtgaaaacacacatcacgaagaagtttctcagaaagcttctgtctagtttttatgtgagtatatttcctatttcaccacaggcctcaaaggaatcccaaatatccctttgcagattctacaaaaagagtgtttctgaactgctcaatgaaaagaaagtttcaactctgtgaggtgaatgcacacataaaaaaagaagtttctcagaatgcttctgtatagtttatatgtgaagatattactttttcaccataggcctctaagtgctcagaaatatccctttgcactttgtataaaaagactatttccaaactgctcaatgaaaagaaagattcatctctgtgtgatgaatgcacacataaaaaataagtttctcagaatgcttccgtctggtttaatgtgaagatatttcctttttcaccataggccttaaactgcacacaaatatctctctgcagatactacaaaaagactgttttcaaactgctccaagaaaagaaagattcaaccctgtgagatgaatgcacacatcccaaaggagtttctcggaatgattctgtctacttttcatgtgaagctaattctttttcaccataggcataaaacggctcaaaaatatccctttgcagattgtacaaaaggatggtttccaatctgctcaatcaaaagaaaggatcnnnnnnnnnnnnnnnnnnnnnnnnnnnnnnnnnnnnnnnnnnnnnnnnnnnnnnnnnnnnnnnnnnnnnnnnnnnnnnnnnnnnnnnnnnnnnnnnnnnnnnnnnnnnnnnnnnnnnnnnnnnnnnnnnnnnnnnnnnnnnnnnnnnnnnnnnnnnnnnnnnnnnnnnnnnnnnnnnnnnnnnnnnnnnnnnnnnnnnnnnnnnnnnnnnnnnnnnnnnnnnnnnnnnnnnnnnnnnnnnnnnnnnnnnnnnnnnnnnnnnnnnnnnnnnnnnnnnnnnnnnnnnnnnnnnnnnnnnnnnnnnnnnnnnnnnnnnnnnnnnnnnnnnnnnnnnnnnnnnnnnnnnnnnnnnnnnnnnnnnnnnnnnnnnnnnnnnnnnnnnnnnnnnnnnnnnnnnnnnnnnnnnnnnnnnnnnnnnnnnnnnnnnnnnnnnnnnnnnnnnnnnnnnnnnnnnnnnnnnnnnnnnnnnnnnnnnnnnnnnnnnnnnnnnnnnnnnnnnnnnnnnnnnnnnnnnnnnnnnnnnnnnnnnnnnnnnnnnnnnnnnnnnnnnnnnnnnnnnnnnnnnnnnnnnnnnnnnnnnnnnnnnnnnnnnnnnnnnnnnnnnnnnnnnnnnnnnnnnnnnnnnnnnnnnnnnnnnnnnnnnnnnnnnnnnnnnnnnnnnnnnnnnnnnnnnnnnnnnnnnnnnnnnnnnnnnnnnnnnnnnnnnnnnnnnnnnnnnnnnnnnnnnnnnnnnnnnnnnnnnnnnnnnnnnnnnnnnnnnnnnnnnnnnnnnnnnnnnnnnnnnnnnnnnnnnnnnnnnnnnnnnnnnnnnnnnnnnnnnnnnnnnnnnnnnnnnnnnnnnnnnnnnnnnnnnnnnnnnnnnnnnnnnnnnnnnnnnnnnnnnnnnnnnnnnnnnnnnnnnnnnnnnnnnnnnnnnnnnnnnnnnnnnnnnnnnnnnnnnnnnnnnnnnnnnnnnnnnnnnnnnnnnnnnnnnnnnnnnnnnnnnnnnnnnnnnnnnnnnnnnnnnnnnnnnnnnnnnnnnnnnnnnnnnnnnnnnnnnnnnnnnnnnnnnnnnnnnnnnnnnnnnnnnnnnnnnnnnnnnnnnnnnnnnnnnnnnnnnnnnnnnnnnnnnnnnnnnnnnnnnnnnnnnnnnnnnnnnnnnnnnnnnnnnnnnnnnnnnnnnnnnnnnnnnnnnnnnnnnnnnnnnnnnnnnnnnnnnnnnnnnnnnnnnnnnnnnnnnnnnnnnnnnnnnnnnnnnnnnnnnnnnnnnnnnnnnnnnnnnnnnnnnnnnnnnnnnnnnnnnnnnnnnnnnnnnnnnnnnnnnnnnnnnnnnnnnnnnnnnnnnnnnnnnnnnnnnnnnnnnnnnnnnnnnnnnnnnnnnnnnnnnnnnnnnnnnnnnnnnnnnnnnnnnnnnnnnnnnnnnnnnnnnnnnnnnnnnnnnnnnnnnnnnnnnnnnnnnnnnnnnnnnnnnnnnnnnnnnnnnnnnnnnnnnnnnnnnnnnnnnnnnnnnnnnnnnnnnnnnnnnnnnnnnnnnnnnnnnnnnnnnnnnnnnnnnnnnnnnnnnnnnnnnnnnnnnnnnnnnnnnnnnnnnnnnnnnnnnnnnnnnnnnnnnnnnnnnnnnnnnnnnnnnnnnnnnnnnnnnnnnnnnnnnnnnnnnnnnnnnnnnnnnnnnnnnnnnnnnnnnnnnnnnnnnnnnnnnnnnnnnnnnnnnnnnnnnnnnnnnnnnnnnnnnnnnnnnnnnnnnnnnnnnnnnnnnnnnnnnnnnnnnnnnnnnnnnnnnnnnnnnnnnnnnnnnnnnnnnnnnnnnnnnnnnnnnnnnnnnnnnnnnnnnnnnnnnnnnnnnnnnnnnnnnnnnnnnnnnnnnnnnnnnnnnnnnnnnnnnnnnnnnnnnnnnnnnnnnnnnnnnnnnnnnnnnnnnnnnnnnnnnnnnnnnnnnnnnnnnnnnnnnnnnnnnnnnnnnnnnnnnnnnnnnnnnnnnnnnnnnnnnnnnnnnnnnnnnnnnnnnnnnnnnnnnnnnnnnnnnnnnnnnnnnnnnnnnnnnnnnnnnnnnnnnnnnnnnnnnnnnnnnnnnnnnnnnnnnnnnnnnnnnnnnnnnnnnnnnnnnnnnnnnnnnnnnnnnnnnnnnnnnnnnnnnnnnnnnnnnnnnnnnnnnnnnnnnnnnnnnnnnnnnnnnnnnnnnnnnnnnnnnnnnnnnnnnnnnnnnnnnnnnnnnnnnnnnnnnnnnnnnnnnnnnnnnnnnnnnnnnnnnnnnnnnnnnnnnnnnnnnnnnnnnnnnnnnnnnnnnnnnnnnnnnnnnnnnnnnnnnnnnnnnnnnnnnnnnnnnnnnnnnnnnnnnnnnnnnnnnnnnnnnnnnnnnnnnnnnnnnnnnnnnnnnnnnnnnnnnnnnnnnnnnnnnnnnnnnnnnnnnnnnnnnnnnnnnnnnnnnnnnnnnnnnnnnnnnnnnnnnnnnnnnnnnnnnnnnnnnnnnnnnnnnnnnnnnnnnnnnnnnnnnnnnnnnnnnnnnnnnnnnnnnnnnnnnnnnnnnnnnnnnnnnnnnnnnnnnnnnnnnnnnnnnnnnnnnnnnnnnnnnnnnnnnnnnnnnnnnnnnnnnnnnnnnnnnnnnnnnnnnnnnnnnnnnnnnnnnnnnnnnnnnnnnnnnnnnnnnnnnnnnnnnnnnnnnnnnnnnnnnnnnnnnnnnnnnnnnnnnnnnnnnnnnnnnnnnnnnnnnnnnnnnnnnnnnnnnnnnnnnnnnnnnnnnnnnnnnnnnnnnnnnnnnnnnnnnnnnnnnnnnnnnnnnnnnnnnnnnnnnnnnnnnnnnnnnnnnnnnnnnnnnnnnnnnnnnnnnnnnnnnnnnnnnnnnnnnnnnnnnnnnnnnnnnnnnnnnnnnnnnnnnnnnnnnnnnnnnnnnnnnnnnnnnnnnnnnnnnnnnnnnnnnnnnnnnnnnnnnnnnnnnnnnnnnnnnnnnnnnnnnnnnnnnnnnnnnnnnnnnnnnnnnnnnnnnnnnnnnnnnnnnnnnnnnnnnnnnnnnnnnnnnnnnnnnnnnnnnnnnnnnnnnnnnnnnnnnnnnnnnnnnnnnnnnnnnnnnnnnnnnnnnnnnnnnnnnnnnnnnnnnnnnnnnnnnnnnnnnnnnnnnnnnnnnnnnnnnnnnnnnnnnnnnnnnnnnnnnnnnnnnnnnnnnnnnnnnnnnnnnnnnnnnnnnnnnnnnnnnnnnnnnnnnnnnnnnnnnnnnnnnnnnnnnnnnnnnnnnnnnnnnnnnnnnnnnnnnnnnnnnnnnnnnnnnnnnnnnnnnnnnnnnnnnnnnnnnnnnnnnnnnnnnnnnnnnnnnnnnnnnnnnnnnnnnnnnnnnnnnnnnnnnnnnnnnnnnnnnnnnnnnnnnnnnnnnnnnnnnnnnnnnnnnnnnnnnnnnnnnnnnnnnnnnnnnnnnnnnnnnnnnnnnnnnnnnnnnnnnnnnnnnnnnnnnnnnnnnnnnnnnnnnnnnnnnnnnnnnnnnnnnnnnnnnnnnnnnnnnnnnnnnnnnnnnnnnnnnnnnnnnnnnnnnnnnnnnnnnnnnnnnnnnnnnnnnnnnnnnnnnnnnnnnnnnnnnnnnnnnnnnnnnnnnnnnnnnnnnnnnnnnnnnnnnnnnnnnnnnnnnnnnnnnnnnnnnnnnnnnnnnnnnnnnnnnnnnnnnnnnnnnnnnnnnnnnnnnnnnnnnnnnnnnnnnnnnnnnnnnnnnnnnnnnnnnnnnnnnnnnnnnnnnnnnnnnnnnnnnnnnnnnnnnnnnnnnnnnnnnnnnnnnnnnnnnnnnnnnnnnnnnnnnnnnnnnnnnnnnnnnnnnnnnnnnnnnnnnnnnnnnnnnnnnnnnnnnnnnnnnnnnnnnnnnnnnnnnnnnnnnnnnnnnnnnnnnnnnnnnnnnnnnnnnnnnnnnnnnnnnnnnnnnnnnnnnnnnnnnnnnnnnnnnnnnnnnnnnnnnnnnnnnnnnnnnnnnnnnnnnnnnnnnnnnnnnnnnnnnnnnnnnnnnnnnnnnnnnnnnnnnnnnnnnnnnnnnnnnnnnnnnnnnnnnnnnnnnnnnnnnnnnnnnnnnnnnnnnnnnnnnnnnnnnnnnnnnnnnnnnnnnnnnnnnnnnnnnnnnnnnnnnnnnnnnnnnnnnnnnnnnnnnnnnnnnnnnnnnnnnnnnnnnnnnnnnnnnnnnnnnnnnnnnnnnnnnnnnnnnnnnnnnnnnnnnnnnnnnnnnnnnnnnnnnnnnnnnnnnnnnnnnnnnnnnnnnnnnnnnnnnnnnnnnnnnnnnnnnnnnnnnnnnnnnnnnnnnnnnnnnnnnnnnnnnnnnnnnnnnnnnnnnnnnnnnnnnnnnnnnnnnnnnnnnnnnnnnnnnnnnnnnnnnnnnnnnnnnnnnnnnnnnnnnnnnnnnnnnnnnnnnnnnnnnnnnnnnnnnnnnnnnnnnnnnnnnnnnnnnnnnnnnnnnnnnnnnnnnnnnnnnnnnnnnnnnnnnnnnnnnnnnnnnnnnnnnnnnnnnnnnnnnnnnnnnnnnnnnnnnnnnnnnnnnnnnnnnnnnnnnnnnnnnnnnnnnnnnnnnnnnnnnnnnnnnnnnnnnnnnnnnnnnnnnnnnnnnnnnnnnnnnnnnnnnnnnnnnnnnnnnnnnnnnnnnnnnnnnnnnnnnnnnnnnnnnnnnnnnnnnnnnnnnnnnnnnnnnnnnnnnnnnnnnnnnnnnnnnnnnnnnnnnnnnnnnnnnnnnnnnnnnnnnnnnnnnnnnnnnnnnnnnnnnnnnnnnnnnnnnnnnnnnnnnnnnnnnnnnnnnnnnnnnnnnnnnnnnnnnnnnnnnnnnnnnnnnnnnnnnnnnnnnnnnnnnnnnnnnnnnnnnnnnnnnnnnnnnnnnnnnnnnnnnnnnnnnnnnnnnnnnnnnnnnnnnnnnnnnnnnnnnnnnnnnnnnnnnnnnnnnnnnnnnnnnnnnnnnnnnnnnnnnnnnnnnnnnnnnnnnnnnnnnnnnnnnnnnnnnnnnnnnnnnnnnnnnnnnnnnnnnnnnnnnnnnnnnnnnnnnnnnnnnnnnnnnnnnnnnnnnnnnnnnnnnnnnnnnnnnnnnnnnnnnnnnnnnnnnnnnnnnnnnnnnnnnnnnnnnnnnnnnnnnnnnnnnnnnnnnnnnnnnnnnnnnnnnnnnnnnnnnnnnnnnnnnnnnnnnnnnnnnnnnnnnnnnnnnnnnnnnnnnnnnnnnnnnnnnnnnnnnnnnnnnnnnnnnnnnnnnnnnnnnnnnnnnnnnnnnnnnnnnnnnnnnnnnnnnnnnnnnnnnnnnnnnnnnnnnnnnnnnnnnnnnnnnnnnnnnnnnnnnnnnnnnnnnnnnnnnnnnnnnnnnnnnnnnnnnnnnnnnnnnnnnnnnnnnnnnnnnnnnnnnnnnnnnnnnnnnnnnnnnnnnnnnnnnnnnnnnnnnnnnnnnnnnnnnnnnnnnnnnnnnnnnnnnnnnnnnnnnnnnnnnnnnnnnnnnnnnnnnnnnnnnnnnnnnnnnnnnnnnnnnnnnnnnnnnnnnnnnnnnnnnnnnnnnnnnnnnnnnnnnnnnnnnnnnnnnnnnnnnnnnnnnnnnnnnnnnnnnnnnnnnnnnnnnnnnnnnnnnnnnnnnnnnnnnnnnnnnnnnnnnnnnnnnnnnnnnnnnnnnnnnnnnnnnnnnnnnnnnnnnnnnnnnnnnnnnnnnnnnnnnnnnnnnnnnnnnnnnnnnnnnnnnnnnnnnnnnnnnnnnnnnnnnnnnnnnnnnnnnnnnnnnnnnnnnnnnnnnnnnnnnnnnnnnnnnnnnnnnnnnnnnnnnnnnnnnnnnnnnnnnnnnnnnnnnnnnnnnnnnnnnnnnnnnnnnnnnnnnnnnnnnnnnnnnnnnnnnnnnnnnnnnnnnnnnnnnnnnnnnnnnnnnnnnnnnnnnnnnnnnnnnnnnnnnnnnnnnnnnnnnnnnnnnnnnnnnnnnnnnnnnnnnnnnnnnnnnnnnnnnnnnnnnnnnnnnnnnnnnnnnnnnnnnnnnnnnnnnnnnnnnnnnnnnnnnnnnnnnnnnnnnnnnnnnnnnnnnnnnnnnnnnnnnnnnnnnnnnnnnnnnnnnnnnnnnnnnnnnnnnnnnnnnnnnnnnnnnnnnnnnnnnnnnnnnnnnnnnnnnnnnnnnnnnnnnnnnnnnnnnnnnnnnnnnnnnnnnnnnnnnnnnnnnnnnnnnnnnnnnnnnnnnnnnnnnnnnnnnnnnnnnnnnnnnnnnnnnnnnnnnnnnnnnnnnnnnnnnnnnnnnnnnnnnnnnnnnnnnnnnnnnnnnnnnnnnnnnnnnnnnnnnnnnnnnnnnnnnnnnnnnnnnnnnnnnnnnnnnnnnnnnnnnnnnnnnnnnnnnnnnnnnnnnnnnnnnnnnnnnnnnnnnnnnnnnnnnnnnnnnnnnnnnnnnnnnnnnnnnnnnnnnnnnnnnnnnnnnnnnnnnnnnnnnnnnnnnnnnnnnnnnnnnnnnnnnnnnnnnnnnnnnnnnnnnnnnnnnnnnnnnnnnnnnnnnnnnnnnnnnnnnnnnnnnnnnnnnnnnnnnnnnnnnnnnnnnnnnnnnnnnnnnnnnnnnnnnnnnnnnnnnnnnnnnnnnnnnnnnnnnnnnnnnnnnnnnnnnnnnnnnnnnnnnnnnnnnnnnnnnnnnnnnnnnnnnnnnnnnnnnnnnnnnnnnnnnnnnnnnnnnnnnnnnnnnnnnnnnnnnnnnnnnnnnnnnnnnnnnnnnnnnnnnnnnnnnnnnnnnnnnnnnnnnnnnnnnnnnnnnnnnnnnnnnnnnnnnnnnnnnnnnnnnnnnnnnnnnnnnnnnnnnnnnnnnnnnnnnnnnnnnnnnnnnnnnnnnnnnnnnnnnnnnnnnnnnnnnnnnnnnnnnnnnnnnnnnnnnnnnnnnnnnnnnnnnnnnnnnnnnnnnnnnnnnnnnnnnnnnnnnnnnnnnnnnnnnnnnnnnnnnnnnnnnnnnnnnnnnnnnnnnnnnnnnnnnnnnnnnnnnnnnnnnnnnnnnnnnnnnnnnnnnnnnnnnnnnnnnnnnnnnnnnnnnnnnnnnnnnnnnnnnnnnnnnnnnnnnnnnnnnnnnnnnnnnnnnnnnnnnnnnnnnnnnnnnnnnnnnnnnnnnnnnnnnnnnnnnnnnnnnnnnnnnnnnnnnnnnnnnnnnnnnnnnnnnnnnnnnnnnnnnnnnnnnnnnnnnnnnnnnnnnnnnnnnnnnnnnnnnnnnnnnnnnnnnnnnnnnnnnnnnnnnnnnnnnnnnnnnnnnnnnnnnnnnnnnnnnnnnnnnnnnnnnnnnnnnnnnnnnnnnnnnnnnnnnnnnnnnnnnnnnnnnnnnnnnnnnnnnnnnnnnnnnnnnnnnnnnnnnnnnnnnnnnnnnnnnnnnnnnnnnnnnnnnnnnnnnnnnnnnnnnnnnnnnnnnnnnnnnnnnnnnnnnnnnnnnnnnnnnnnnnnnnnnnnnnnnnnnnnnnnnnnnnnnnnnnnnnnnnnnnnnnnnnnnnnnnnnnnnnnnnnnnnnnnnnnnnnnnnnnnnnnnnnnnnnnnnnnnnnnnnnnnnnnnnnnnnnnnnnnnnnnnnnnnnnnnnnnnnnnnnnnnnnnnnnnnnnnnnnnnnnnnnnnnnnnnnnnnnnnnnnnnnnnnnnnnnnnnnnnnnnnnnnnnnnnnnnnnnnnnnnnnnnnnnnnnnnnnnnnnnnnnnnnnnnnnnnnnnnnnnnnnnnnnnnnnnnnnnnnnnnnnnnnnnnnnnnnnnnnnnnnnnnnnnnnnnnnnnnnnnnnnnnnnnnnnnnnnnnnnnnnnnnnnnnnnnnnnnnnnnnnnnnnnnnnnnnnnnnnnnnnnnnnnnnnnnnnnnnnnnnnnnnnnnnnnnnnnnnnnnnnnnnnnnnnnnnnnnnnnnnnnnnnnnnnnnnnnnnnnnnnnnnnnnnnnnnnnnnnnnnnnnnnnnnnnnnnnnnnnnnnnnnnnnnnnnnnnnnnnnnnnnnnnnnnnnnnnnnnnnnnnnnnnnnnnnnnnnnnnnnnnnnnnnnnnnnnnnnnnnnnnnnnnnnnnnnnnnnnnnnnnnnnnnnnnnnnnnnnnnnnnnnnnnnnnnnnnnnnnnnnnnnnnnnnnnnnnnnnnnnnnnnnnnnnnnnnnnnnnnnnnnnnnnnnnnnnnnnnnnnnnnnnnnnnnnnnnnnnnnnnnnnnnnnnnnnnnnnnnnnnnnnnnnnnnnnnnnnnnnnnnnnnnnnnnnnnnnnnnnnnnnnnnnnnnnnnnnnnnnnnnnnnnnnnnnnnnnnnnnnnnnnnnnnnnnnnnnnnnnnnnnnnnnnnnnnnnnnnnnnnnnnnnnnnnnnnnnnnnnnnnnnnnnnnnnnnnnnnnnnnnnnnnnnnnnnnnnnnnnnnnnnnnnnnnnnnnnnnnnnnnnnnnnnnnnnnnnnnnnnnnnnnnnnnnnnnnnnnnnnnnnnnnnnnnnnnnnnnnnnnnnnnnnnnnnnnnnnnnnnnnnnnnnnnnnnnnnnnnnnnnnnnnnnnnnnnnnnnnnnnnnnnnnnnnnnnnnnnnnnnnnnnnnnnnnnnnnnnnnnnnnnnnnnnnnnnnnnnnnnnnnnnnnnnnnnnnnnnnnnnnnnnnnnnnnnnnnnnnnnnnnnnnnnnnnnnnnnnnnnnnnnnnnnnnnnnnnnnnnnnnnnnnnnnnnnnnnnnnnnnnnnnnnnnnnnnnnnnnnnnnnnnnnnnnnnnnnnnnnnnnnnnnnnnnnnnnnnnnnnnnnnnnnnnnnnnnnnnnnnnnnnnnnnnnnnnnnnnnnnnnnnnnnnnnnnnnnnnnnnnnnnnnnnnnnnnnnnnnnnnnnnnnnnnnnnnnnnnnnnnnnnnnnnnnnnnnnnnnnnnnnnnnnnnnnnnnnnnnnnnnnnnnnnnnnnnnnnnnnnnnnnnnnnnnnnnnnnnnnnnnnnnnnnnnnnnnnnnnnnnnnnnnnnnnnnnnnnnnnnnnnnnnnnnnnnnnnnnnnnnnnnnnnnnnnnnnnnnnnnnnnnnnnnnnnnnnnnnnnnnnnnnnnnnnnnnnnnnnnnnnnnnnnnnnnnnnnnnnnnnnnnnnnnnnnnnnnnnnnnnnnnnnnnnnnnnnnnnnnnnnnnnnnnnnnnnnnnnnnnnnnnnnnnnnnnnnnnnnnnnnnnnnnnnnnnnnnnnnnnnnnnnnnnnnnnnnnnnnnnnnnnnnnnnnnnnnnnnnnnnnnnnnnnnnnnnnnnnnnnnnnnnnnnnnnnnnnnnnnnnnnnnnnnnnnnnnnnnnnnnnnnnnnnnnnnnnnnnnnnnnnnnnnnnnnnnnnnnnnnnnnnnnnnnnnnnnnnnnnnnnnnnnnnnnnnnnnnnnnnnnnnnnnnnnnnnnnnnnnnnnnnnnnnnnnnnnnnnnnnnnnnnnnnnnnnnnnnnnnnnnnnnnnnnnnnnnnnnnnnnnnnnnnnnnnnnnnnnnnnnnnnnnnnnnnnnnnnnnnnnnnnnnnnnnnnnnnnnnnnnnnnnnnnnnnnnnnnnnnnnnnnnnnnnnnnnnnnnnnnnnnnnnnnnnnnnnnnnnnnnnnnnnnnnnnnnnnnnnnnnnnnnnnnnnnnnnnnnnnnnnnnnnnnnnnnnnnnnnnnnnnnnnnnnnnnnnnnnnnnnnnnnnnnnnnnnnnnnnnnnnnnnnnnnnnnnnnnnnnnnnnnnnnnnnnnnnnnnnnnnnnnnnnnnnnnnnnnnnnnnnnnnnnnnnnnnnnnnnnnnnnnnnnnnnnnnnnnnnnnnnnnnnnnnnnnnnnnnnnnnnnnnnnnnnnnnnnnnnnnnnnnnnnnnnnnnnnnnnnnnnnnnnnnnnnnnnnnnnnnnnnnnnnnnnnnnnnnnnnnnnnnnnnnnnnnnnnnnnnnnnnnnnnnnnnnnnnnnnnnnnnnnnnnnnnnnnnnnnnnnnnnnnnnnnnnnnnnnnnnnnnnnnnnnnnnnnnnnnnnnnnnnnnnnnnnnnnnnnnnnnnnnnnnnnnnnnnnnnnnnnnnnnnnnnnnnnnnnnnnnnnnnnnnnnnnnnnnnnnnnnnnnnnnnnnnnnnnnnnnnnnnnnnnnnnnnnnnnnnnnnnnnnnnnnnnnnnnnnnnnnnnnnnnnnnnnnnnnnnnnnnnnnnnnnnnnnnnnnnnnnnnnnnnnnnnnnnnnnnnnnnnnnnnnnnnnnnnnnnnnnnnnnnnnnnnnnnnnnnnnnnnnnnnnnnnnnnnnnnnnnnnnnnnnnnnnnnnnnnnnnnnnnnnnnnnnnnnnnnnnnnnnnnnnnnnnnnnnnnnnnnnnnnnnnnnnnnnnnnnnnnnnnnnnnnnnnnnnnnnnnnnnnnnnnnnnnnnnnnnnnnnnnnnnnnnnnnnnnnnnnnnnnnnnnnnnnnnnnnnnnnnnnnnnnnnnnnnnnnnnnnnnnnnnnnnnnnnnnnnnnnnnnnnnnnnnnnnnnnnnnnnnnnnnnnnnnnnnnnnnnnnnnnnnnnnnnnnnnnnnnnnnnnnnnnnnnnnnnnnnnnnnnnnnnnnnnnnnnnnnnnnnnnnnnnnnnnnnnnnnnnnnnnnnnnnnnnnnnnnnnnnnnnnnnnnnnnnnnnnnnnnnnnnnnnnnnnnnnnnnnnnnnnnnnnnnnnnnnnnnnnnnnnnnnnnnnnnnnnnnnnnnnnnnnnnnnnnnnnnnnnnnnnnnnnnnnnnnnnnnnnnnnnnnnnnnnnnnnnnnnnnnnnnnnnnnnnnnnnnnnnnnnnnnnnnnnnnnnnnnnnnnnnnnnnnnnnnnnnnnnnnnnnnnnnnnnnnnnnnnnnnnnnnnnnnnnnnnnnnnnnnnnnnnnnnnnnnnnnnnnnnnnnnnnnnnnnnnnnnnnnnnnnnnnnnnnnnnnnnnnnnnnnnnnnnnnnnnnnnnnnnnnnnnnnnnnnnnnnnnnnnnnnnnnnnnnnnnnnnnnnnnnnnnnnnnnnnnnnnnnnnnnnnnnnnnnnnnnnnnnnnnnnnnnnnnnnnnnnnnnnnnnnnnnnnnnnnnnnnnnnnnnnnnnnnnnnnnnnnnnnnnnnnnnnnnnnnnnnnnnnnnnnnnnnnnnnnnnnnnnnnnnnnnnnnnnnnnnnnnnnnnnnnnnnnnnnnnnnnnnnnnnnnnnnnnnnnnnnnnnnnnnnnnnnnnnnnnnnnnnnnnnnnnnnnnnnnnnnnnnnnnnnnnnnnnnnnnnnnnnnnnnnnnnnnnnnnnnnnnnnnnnnnnnnnnnnnnnnnnnnnnnnnnnnnnnnnnnnnnnnnnnnnnnnnnnnnnnnnnnnnnnnnnnnnnnnnnnnnnnnnnnnnnnnnnnnnnnnnnnnnnnnnnnnnnnnnnnnnnnnnnnnnnnnnnnnnnnnnnnnnnnnnnnnnnnnnnnnnnnnnnnnnnnnnnnnnnnnnnnnnnnnnnnnnnnnnnnnnnnnnnnnnnnnnnnnnnnnnnnnnnnnnnnnnnnnnnnnnnnnnnnnnnnnnnnnnnnnnnnnnnnnnnnnnnnnnnnnnnnnnnnnnnnnnnnnnnnnnnnnnnnnnnnnnnnnnnnnnnnnnnnnnnnnnnnnnnnnnnnnnnnnnnnnnnnnnnnnnnnnnnnnnnnnnnnnnnnnnnnnnnnnnnnnnnnnnnnnnnnnnnnnnnnnnnnnnnnnnnnnnnnnnnnnnnnnnnnnnnnnnnnnnnnnnnnnnnnnnnnnnnnnnnnnnnnnnnnnnnnnnnnnnnnnnnnnnnnnnnnnnnnnnnnnnnnnnnnnnnnnnnnnnnnnnnnnnnnnnnnnnnnnnnnnnnnnnnnnnnnnnnnnnnnnnnnnnnnnnnnnnnnnnnnnnnnnnnnnnnnnnnnnnnnnnnnnnnnnnnnnnnnnnnnnnnnnnnnnnnnnnnnnnnnnnnnnnnnnnnnnnnnnnnnnnnnnnnnnnnnnnnnnnnnnnnnnnnnnnnnnnnnnnnnnnnnnnnnnnnnnnnnnnnnnnnnnnnnnnnnnnnnnnnnnnnnnnnnnnnnnnnnnnnnnnnnnnnnnnnnnnnnnnnnnnnnnnnnnnnnnnnnnnnnnnnnnnnnnnnnnnnnnnnnnnnnnnnnnnnnnnnnnnnnnnnnnnnnnnnnnnnnnnnnnnnnnnnnnnnnnnnnnnnnnnnnnnnnnnnnnnnnnnnnnnnnnnnnnnnnnnnnnnnnnnnnnnnnnnnnnnnnnnnnnnnnnnnnnnnnnnnnnnnnnnnnnnnnnnnnnnnnnnnnnnnnnnnnnnnnnnnnnnnnnnnnnnnnnnnnnnnnnnnnnnnnnnnnnnnnnnnnnnnnnnnnnnnnnnnnnnnnnnnnnnnnnnnnnnnnnnnnnnnnnnnnnnnnnnnnnnnnnnnnnnnnnnnnnnnnnnnnnnnnnnnnnnnnnnnnnnnnnnnnnnnnnnnnnnnnnnnnnnnnnnnnnnnnnnnnnnnnnnnnnnnnnnnnnnnnnnnnnnnnnnnnnnnnnnnnnnnnnnnnnnnnnnnnnnnnnnnnnnnnnnnnnnnnnnnnnnnnnnnnnnnnnnnnnnnnnnnnnnnnnnnnnnnnnnnnnnnnnnnnnnnnnnnnnnnnnnnnnnnnnnnnnnnnnnnnnnnnnnnnnnnnnnnnnnnnnnnnnnnnnnnnnnnnnnnnnnnnnnnnnnnnnnnnnnnnnnnnnnnnnnnnnnnnnnnnnnnnnnnnnnnnnnnnnnnnnnnnnnnnnnnnnnnnnnnnnnnnnnnnnnnnnnnnnnnnnnnnnnnnnnnnnnnnnnnnnnnnnnnnnnnnnnnnnnnnnnnnnnnnnnnnnnnnnnnnnnnnnnnnnnnnnnnnnnnnnnnnnnnnnnnnnnnnnnnnnnnnnnnnnnnnnnnnnnnnnnnnnnnnnnnnnnnnnnnnnnnnnnnnnnnnnnnnnnnnnnnnnnnnnnnnnnnnnnnnnnnnnnnnnnnnnnnnnnnnnnnnnnnnnnnnnnnnnnnnnnnnnnnnnnnnnnnnnnnnnnnnnnnnnnnnnnnnnnnnnnnnnnnnnnnnnnnnnnnnnnnnnnnnnnnnnnnnnnnnnnnnnnnnnnnnnnnnnnnnnnnnnnnnnnnnnnnnnnnnnnnnnnnnnnnnnnnnnnnnnnnnnnnnnnnnnnnnnnnnnnnnnnnnnnnnnnnnnnnnnnnnnnnnnnnnnnnnnnnnnnnnnnnnnnnnnnnnnnnnnnnnnnnnnnnnnnnnnnnnnnnnnnnnnnnnnnnnnnnnnnnnnnnnnnnnnnnnnnnnnnnnnnnnnnnnnnnnnnnnnnnnnnnnnnnnnnnnnnnnnnnnnnnnnnnnnnnnnnnnnnnnnnnnnnnnnnnnnnnnnnnnnnnnnnnnnnnnnnnnnnnnnnnnnnnnnnnnnnnnnnnnnnnnnnnnnnnnnnnnnnnnnnnnnnnnnnnnnnnnnnnnnnnnnnnnnnnnnnnnnnnnnnnnnnnnnnnnnnnnnnnnnnnnnnnnnnnnnnnnnnnnnnnnnnnnnnnnnnnnnnnnnnnnnnnnnnnnnnnnnnnnnnnnnnnnnnnnnnnnnnnnnnnnnnnnnnnnnnnnnnnnnnnnnnnnnnnnnnnnnnnnnnnnnnnnnnnnnnnnnnnnnnnnnnnnnnnnnnnnnnnnnnnnnnnnnnnnnnnnnnnnnnnnnnnnnnnnnnnnnnnnnnnnnnnnnnnnnnnnnnnnnnnnnnnnnnnnnnnnnnnnnnnnnnnnnnnnnnnnnnnnnnnnnnnnnnnnnnnnnnnnnnnnnnnnnnnnnnnnnnnnnnnnnnnnnnnnnnnnnnnnnnnnnnnnnnnnnnnnnnnnnnnnnnnnnnnnnnnnnnnnnnnnnnnnnnnnnnnnnnnnnnnnnnnnnnnnnnnnnnnnnnnnnnnnnnnnnnnnnnnnnnnnnnnnnnnnnnnnnnnnnnnnnnnnnnnnnnnnnnnnnnnnnnnnnnnnnnnnnnnnnnnnnnnnnnnnnnnnnnnnnnnnnnnnnnnnnnnnnnnnnnnnnnnnnnnnnnnnnnnnnnnnnnnnnnnnnnnnnnnnnnnnnnnnnnnnnnnnnnnnnnnnnnnnnnnnnnnnnnnnnnnnnnnnnnnnnnnnnnnnnnnnnnnnnnnnnnnnnnnnnnnnnnnnnnnnnnnnnnnnnnnnnnnnnnnnnnnnnnnnnnnnnnnnnnnnnnnnnnnnnnnnnnnnnnnnnnnnnnnnnnnnnnnnnnnnnnnnnnnnnnnnnnnnnnnnnnnnnnnnnnnnnnnnnnnnnnnnnnnnnnnnnnnnnnnnnnnnnnnnnnnnnnnnnnnnnnnnnnnnnnnnnnnnnnnnnnnnnnnnnnnnnnnnnnnnnnnnnnnnnnnnnnnnnnnnnnnnnnnnnnnnnnnnnnnnnnnnnnnnnnnnnnnnnnnnnnnnnnnnnnnnnnnnnnnnnnnnnnnnnnnnnnnnnnnnnnnnnnnnnnnnnnnnnnnnnnnnnnnnnnnnnnnnnnnnnnnnnnnnnnnnnnnnnnnnnnnnnnnnnnnnnnnnnnnnnnnnnnnnnnnnnnnnnnnnnnnnnnnnnnnnnnnnnnnnnnnnnnnnnnnnnnnnnnnnnnnnnnnnnnnnnnnnnnnnnnnnnnnnnnnnnnnnnnnnnnnnnnnnnnnnnnnnnnnnnnnnnnnnnnnnnnnnnnnnnnnnnnnnnnnnnnnnnnnnnnnnnnnnnnnnnnnnnnnnnnnnnnnnnnnnnnnnnnnnnnnnnnnnnnnnnnnnnnnnnnnnnnnnnnnnnnnnnnnnnnnnnnnnnnnnnnnnnnnnnnnnnnnnnnnnnnnnnnnnnnnnnnnnnnnnnnnnnnnnnnnnnnnnnnnnnnnnnnnnnnnnnnnnnnnnnnnnnnnnnnnnnnnnnnnnnnnnnnnnnnnnnnnnnnnnnnnnnnnnnnnnnnnnnnnnnnnnnnnnnnnnnnnnnnnnnnnnnnnnnnnnnnnnnnnnnnnnnnnnnnnnnnnnnnnnnnnnnnnnnnnnnnnnnnnnnnnnnnnnnnnnnnnnnnnnnnnnnnnnnnnnnnnnnnnnnnnnnnnnnnnnnnnnnnnnnnnnnnnnnnnnnnnnnnnnnnnnnnnnnnnnnnnnnnnnnnnnnnnnnnnnnnnnnnnnnnnnnnnnnnnnnnnnnnnnnnnnnnnnnnnnnnnnnnnnnnnnnnnnnnnnnnnnnnnnnnnnnnnnnnnnnnnnnnnnnnnnnnnnnnnnnnnnnnnnnnnnnnnnnnnnnnnnnnnnnnnnnnnnnnnnnnnnnnnnnnnnnnnnnnnnnnnnnnnnnnnnnnnnnnnnnnnnnnnnnnnnnnnnnnnnnnnnnnnnnnnnnnnnnnnnnnnnnnnnnnnnnnnnnnnnnnnnnnnnnnnnnnnnnnnnnnnnnnnnnnnnnnnnnnnnnnnnnnnnnnnnnnnnnnnnnnnnnnnnnnnnnnnnnnnnnnnnnnnnnnnnnnnnnnnnnnnnnnnnnnnnnnnnnnnnnnnnnnnnnnnnnnnnnnnnnnnnnnnnnnnnnnnnnnnnnnnnnnnnnnnnnnnnnnnnnnnnnnnnnnnnnnnnnnnnnnnnnnnnnnnnnnnnnnnnnnnnnnnnnnnnnnnnnnnnnnnnnnnnnnnnnnnnnnnnnnnnnnnnnnnnnnnnnnnnnnnnnnnnnnnnnnnnnnnnnnnnnnnnnnnnnnnnnnnnnnnnnnnnnnnnnnnnnnnnnnnnnnnnnnnnnnnnnnnnnnnnnnnnnnnnnnnnnnnnnnnnnnnnnnnnnnnnnnnnnnnnnnnnnnnnnnnnnnnnnnnnnnnnnnnnnnnnnnnnnnnnnnnnnnnnnnnnnnnnnnnnnnnnnnnnnnnnnnnnnnnnnnnnnnnnnnnnnnnnnnnnnnnnnnnnnnnnnnnnnnnnnnnnnnnnnnnnnnnnnnnnnnnnnnnnnnnnnnnnnnnnnnnnnnnnnnnnnnnnnnnnnnnnnnnnnnnnnnnnnnnnnnnnnnnnnnnnnnnnnnnnnnnnnnnnnnnnnnnnnnnnnnnnnnnnnnnnnnnnnnnnnnnnnnnnnnnnnnnnnnnnnnnnnnnnnnnnnnnnnnnnnnnnnnnnnnnnnnnnnnnnnnnnnnnnnnnnnnnnnnnnnnnnnnnnnnnnnnnnnnnnnnnnnnnnnnnnnnnnnnnnnnnnnnnnnnnnnnnnnnnnnnnnnnnnnnnnnnnnnnnnnnnnnnnnnnnnnnnnnnnnnnnnnnnnnnnnnnnnnnnnnnnnnnnnnnnnnnnnnnnnnnnnnnnnnnnnnnnnnnnnnnnnnnnnnnnnnnnnnnnnnnnnnnnnnnnnnnnnnnnnnnnnnnnnnnnnnnnnnnnnnnnnnnnnnnnnnnnnnnnnnnnnnnnnnnnnnnnnnnnnnnnnnnnnnnnnnnnnnnnnnnnnnnnnnnnnnnnnnnnnnnnnnnnnnnnnnnnnnnnnnnnnnnnnnnnnnnnnnnnnnnnnnnnnnnnnnnnnnnnnnnnnnnnnnnnnnnnnnnnnnnnnnnnnnnnnnnnnnnnnnnnnnnnnnnnnnnnnnnnnnnnnnnnnnnnnnnnnnnnnnnnnnnnnnnnnnnnnnnnnnnnnnnnnnnnnnnnnnnnnnnnnnnnnnnnnnnnnnnnnnnnnnnnnnnnnnnnnnnnnnnnnnnnnnnnnnnnnnnnnnnnnnnnnnnnnnnnnnnnnnnnnnnnnnnnnnnnnnnnnnnnnnnnnnnnnnnnnnnnnnnnnnnnnnnnnnnnnnnnnnnnnnnnnnnnnnnnnnnnnnnnnnnnnnnnnnnnnnnnnnnnnnnnnnnnnnnnnnnnnnnnnnnnnnnnnnnnnnnnnnnnnnnnnnnnnnnnnnnnnnnnnnnnnnnnnnnnnnnnnnnnnnnnnnnnnnnnnnnnnnnnnnnnnnnnnnnnnnnnnnnnnnnnnnnnnnnnnnnnnnnnnnnnnnnnnnnnnnnnnnnnnnnnnnnnnnnnnnnnnnnnnnnnnnnnnnnnnnnnnnnnnnnnnnnnnnnnnnnnnnnnnnnnnnnnnnnnnnnnnnnnnnnnnnnnnnnnnnnnnnnnnnnnnnnnnnnnnnnnnnnnnnnnnnnnnnnnnnnnnnnnnnnnnnnnnnnnnnnnnnnnnnnnnnnnnnnnnnnnnnnnnnnnnnnnnnnnnnnnnnnnnnnnnnnnnnnnnnnnnnnnnnnnnnnnnnnnnnnnnnnnnnnnnnnnnnnnnnnnnnnnnnnnnnnnnnnnnnnnnnnnnnnnnnnnnnnnnnnnnnnnnnnnnnnnnnnnnnnnnnnnnnnnnnnnnnnnnnnnnnnnnnnnnnnnnnnnnnnnnnnnnnnnnnnnnnnnnnnnnnnnnnnnnnnnnnnnnnnnnnnnnnnnnnnnnnnnnnnnnnnnnnnnnnnnnnnnnnnnnnnnnnnnnnnnnnnnnnnnnnnnnnnnnnnnnnnnnnnnnnnnnnnnnnnnnnnnnnnnnnnnnnnnnnnnnnnnnnnnnnnnnnnnnnnnnnnnnnnnnnnnnnnnnnnnnnnnnnnnnnnnnnnnnnnnnnnnnnnnnnnnnnnnnnnnnnnnnnnnnnnnnnnnnnnnnnnnnnnnnnnnnnnnnnnnnnnnnnnnnnnnnnnnnnnnnnnnnnnnnnnnnnnnnnnnnnnnnnnnnnnnnnnnnnnnnnnnnnnnnnnnnnnnnnnnnnnnnnnnnnnnnnnnnnnnnnnnnnnnnnnnnnnnnnnnnnnnnnnnnnnnnnnnnnnnnnnnnnnnnnnnnnnnnnnnnnnnnnnnnnnnnnnnnnnnnnnnnnnnnnnnnnnnnnnnnnnnnnnnnnnnnnnnnnnnnnnnnnnnnnnnnnnnnnnnnnnnnnnnnnnnnnnnnnnnnnnnnnnnnnnnnnnnnnnnnnnnnnnnnnnnnnnnnnnnnnnnnnnnnnnnnnnnnnnnnnnnnnnnnnnnnnnnnnnnnnnnnnnnnnnnnnnnnnnnnnnnnnnnnnnnnnnnnnnnnnnnnnnnnnnnnnnnnnnnnnnnnnnnnnnnnnnnnnnnnnnnnnnnnnnnnnnnnnnnnnnnnnnnnnnnnnnnnnnnnnnnnnnnnnnnnnnnnnnnnnnnnnnnnnnnnnnnnnnnnnnnnnnnnnnnnnnnnnnnnnnnnnnnnnnnnnnnnnnnnnnnnnnnnnnnnnnnnnnnnnnnnnnnnnnnnnnnnnnnnnnnnnnnnnnnnnnnnnnnnnnnnnnnnnnnnnnnnnnnnnnnnnnnnnnnnnnnnnnnnnnnnnnnnnnnnnnnnnnnnnnnnnnnnnnnnnnnnnnnnnnnnnnnnnnnnnnnnnnnnnnnnnnnnnnnnnnnnnnnnnnnnnnnnnnnnnnnnnnnnnnnnnnnnnnnnnnnnnnnnnnnnnnnnnnnnnnnnnnnnnnnnnnnnnnnnnnnnnnnnnnnnnnnnnnnnnnnnnnnnnnnnnnnnnnnnnnnnnnnnnnnnnnnnnnnnnnnnnnnnnnnnnnnnnnnnnnnnnnnnnnnnnnnnnnnnnnnnnnnnnnnnnnnnnnnnnnnnnnnnnnnnnnnnnnnnnnnnnnnnnnnnnnnnnnnnnnnnnnnnnnnnnnnnnnnnnnnnnnnnnnnnnnnnnnnnnnnnnnnnnnnnnnnnnnnnnnnnnnnnnnnnnnnnnnnnnnnnnnnnnnnnnnnnnnnnnnnnnnnnnnnnnnnnnnnnnnnnnnnnnnnnnnnnnnnnnnnnnnnnnnnnnnnnnnnnnnnnnnnnnnnnnnnnnnnnnnnnnnnnnnnnnnnnnnnnnnnnnnnnnnnnnnnnnnnnnnnnnnnnnnnnnnnnnnnnnnnnnnnnnnnnnnnnnnnnnnnnnnnnnnnnnnnnnnnnnnnnnnnnnnnnnnnnnnnnnnnnnnnnnnnnnnnnnnnnnnnnnnnnnnnnnnnnnnnnnnnnnnnnnnnnnnnnnnnnnnnnnnnnnnnnnnnnnnnnnnnnnnnnnnnnnnnnnnnnnnnnnnnnnnnnnnnnnnnnnnnnnnnnnnnnnnnnnnnnnnnnnnnnnnnnnnnnnnnnnnnnnnnnnnnnnnnnnnnnnnnnnnnnnnnnnnnnnnnnnnnnnnnnnnnnnnnnnnnnnnnnnnnnnnnnnnnnnnnnnnnnnnnnnnnnnnnnnnnnnnnnnnnnnnnnnnnnnnnnnnnnnnnnnnnnnnnnnnnnnnnnnnnnnnnnnnnnnnnnnnnnnnnnnnnnnnnnnnnnnnnnnnnnnnnnnnnnnnnnnnnnnnnnnnnnnnnnnnnnnnnnnnnnnnnnnnnnnnnnnnnnnnnnnnnnnnnnnnnnnnnnnnnnnnnnnnnnnnnnnnnnnnnnnnnnnnnnnnnnnnnnnnnnnnnnnnnnnnnnnnnnnnnnnnnnnnnnnnnnnnnnnnnnnnnnnnnnnnnnnnnnnnnnnnnnnnnnnnnnnnnnnnnnnnnnnnnnnnnnnnnnnnnnnnnnnnnnnnnnnnnnnnnnnnnnnnnnnnnnnnnnnnnnnnnnnnnnnnnnnnnnnnnnnnnnnnnnnnnnnnnnnnnnnnnnnnnnnnnnnnnnnnnnnnnnnnnnnnnnnnnnnnnnnnnnnnnnnnnnnnnnnnnnnnnnnnnnnnnnnnnnnnnnnnnnnnnnnnnnnnnnnnnnnnnnnnnnnnnnnnnnnnnnnnnnnnnnnnnnnnnnnnnnnnnnnnnnnnnnnnnnnnnnnnnnnnnnnnnnnnnnnnnnnnnnnnnnnnnnnnnnnnnnnnnnnnnnnnnnnnnnnnnnnnnnnnnnnnnnnnnnnnnnnnnnnnnnnnnnnnnnnnnnnnnnnnnnnnnnnnnnnnnnnnnnnnnnnnnnnnnnnnnnnnnnnnnnnnnnnnnnnnnnnnnnnnnnnnnnnnnnnnnnnnnnnnnnnnnnnnnnnnnnnnnnnnnnnnnnnnnnnnnnnnnnnnnnnnnnnnnnnnnnnnnnnnnnnnnnnnnnnnnnnnnnnnnnnnnnnnnnnnnnnnnnnnnnnnnnnnnnnnnnnnnnnnnnnnnnnnnnnnnnnnnnnnnnnnnnnnnnnnnnnnnnnnnnnnnnnnnnnnnnnnnnnnnnnnnnnnnnnnnnnnnnnnnnnnnnnnnnnnnnnnnnnnnnnnnnnnnnnnnnnnnnnnnnnnnnnnnnnnnnnnnnnnnnnnnnnnnnnnnnnnnnnnnnnnnnnnnnnnnnnnnnnnnnnnnnnnnnnnnnnnnnnnnnnnnnnnnnnnnnnnnnnnnnnnnnnnnnnnnnnnnnnnnnnnnnnnnnnnnnnnnnnnnnnnnnnnnnnnnnnnnnnnnnnnnnnnnnnnnnnnnnnnnnnnnnnnnnnnnnnnnnnnnnnnnnnnnnnnnnnnnnnnnnnnnnnnnnnnnnnnnnnnnnnnnnnnnnnnnnnnnnnnnnnnnnnnnnnnnnnnnnnnnnnnnnnnnnnnnnnnnnnnnnnnnnnnnnnnnnnnnnnnnnnnnnnnnnnnnnnnnnnnnnnnnnnnnnnnnnnnnnnnnnnnnnnnnnnnnnnnnnnnnnnnnnnnnnnnnnnnnnnnnnnnnnnnnnnnnnnnnnnnnnnnnnnnnnnnnnnnnnnnnnnnnnnnnnnnnnnnnnnnnnnnnnnnnnnnnnnnnnnnnnnnnnnnnnnnnnnnnnnnnnnnnnnnnnnnnnnnnnnnnnnnnnnnnnnnnnnnnnnnnnnnnnnnnnnnnnnnnnnnnnnnnnnnnnnnnnnnnnnnnnnnnnnnnnnnnnnnnnnnnnnnnnnnnnnnnnnnnnnnnnnnnnnnnnnnnnnnnnnnnnnnnnnnnnnnnnnnnnnnnnnnnnnnnnnnnnnnnnnnnnnnnnnnnnnnnnnnnnnnnnnnnnnnnnnnnnnnnnnnnnnnnnnnnnnnnnnnnnnnnnnnnnnnnnnnnnnnnnnnnnnnnnnnnnnnnnnnnnnnnnnnnnnnnnnnnnnnnnnnnnnnnnnnnnnnnnnnnnnnnnnnnnnnnnnnnnnnnnnnnnnnnnnnnnnnnnnnnnnnnnnnnnnnnnnnnnnnnnnnnnnnnnnnnnnnnnnnnnnnnnnnnnnnnnnnnnnnnnnnnnnnnnnnnnnnnnnnnnnnnnnnnnnnnnnnnnnnnnnnnnnnnnnnnnnnnnnnnnnnnnnnnnnnnnnnnnnnnnnnnnnnnnnnnnnnnnnnnnnnnnnnnnnnnnnnnnnnnnnnnnnnnnnnnnnnnnnnnnnnnnnnnnnnnnnnnnnnnnnnnnnnnnnnnnnnnnnnnnnnnnnnnnnnnnnnnnnnnnnnnnnnnnnnnnnnnnnnnnnnnnnnnnnnnnnnnnnnnnnnnnnnnnnnnnnnnnnnnnnnnnnnnnnnnnnnnnnnnnnnnnnnnnnnnnnnnnnnnnnnnnnnnnnnnnnnnnnnnnnnnnnnnnnnnnnnnnnnnnnnnnnnnnnnnnnnnnnnnnnnnnnnnnnnnnnnnnnnnnnnnnnnnnnnnnnnnnnnnnnnnnnnnnnnnnnnnnnnnnnnnnnnnnnnnnnnnnnnnnnnnnnnnnnnnnnnnnnnnnnnnnnnnnnnnnnnnnnnnnnnnnnnnnnnnnnnnnnnnnnnnnnnnnnnnnnnnnnnnnnnnnnnnnnnnnnnnnnnnnnnnnnnnnnnnnnnnnnnnnnnnnnnnnnnnnnnnnnnnnnnnnnnnnnnnnnnnnnnnnnnnnnnnnnnnnnnnnnnnnnnnnnnnnnnnnnnnnnnnnnnnnnnnnnnnnnnnnnnnnnnnnnnnnnnnnnnnnnnnnnnnnnnnnnnnnnnnnnnnnnnnnnnnnnnnnnnnnnnnnnnnnnnnnnnnnnnnnnnnnnnnnnnnnnnnnnnnnnnnnnnnnnnnnnnnnnnnnnnnnnnnnnnnnnnnnnnnnnnnnnnnnnnnnnnnnnnnnnnnnnnnnnnnnnnnnnnnnnnnnnnnnnnnnnnnnnnnnnnnnnnnnnnnnnnnnnnnnnnnnnnnnnnnnnnnnnnnnnnnnnnnnnnnnnnnnnnnnnnnnnnnnnnnnnnnnnnnnnnnnnnnnnnnnnnnnnnnnnnnnnnnnnnnnnnnnnnnnnnnnnnnnnnnnnnnnnnnnnnnnnnnnnnnnnnnnnnnnnnnnnnnnnnnnnnnnnnnnnnnnnnnnnnnnnnnnnnnnnnnnnnnnnnnnnnnnnnnnnnnnnnnnnnnnnnnnnnnnnnnnnnnnnnnnnnnnnnnnnnnnnnnnnnnnnnnnnnnnnnnnnnnnnnnnnnnnnnnnnnnnnnnnnnnnnnnnnnnnnnnnnnnnnnnnnnnnnnnnnnnnnnnnnnnnnnnnnnnnnnnnnnnnnnnnnnnnnnnnnnnnnnnnnnnnnnnnnnnnnnnnnnnnnnnnnnnnnnnnnnnnnnnnnnnnnnnnnnnnnnnnnnnnnnnnnnnnnnnnnnnnnnnnnnnnnnnnnnnnnnnnnnnnnnnnnnnnnnnnnnnnnnnnnnnnnnnnnnnnnnnnnnnnnnnnnnnnnnnnnnnnnnnnnnnnnnnnnnnnnnnnnnnnnnnnnnnnnnnnnnnnnnnnnnnnnnnnnnnnnnnnnnnnnnnnnnnnnnnnnnnnnnnnnnnnnnnnnnnnnnnnnnnnnnnnnnnnnnnnnnnnnnnnnnnnnnnnnnnnnnnnnnnnnnnnnnnnnnnnnnnnnnnnnnnnnnnnnnnnnnnnnnnnnnnnnnnnnnnnnnnnnnnnnnnnnnnnnnnnnnnnnnnnnnnnnnnnnnnnnnnnnnnnnnnnnnnnnnnnnnnnnnnnnnnnnnnnnnnnnnnnnnnnnnnnnnnnnnnnnnnnnnnnnnnnnnnnnnnnnnnnnnnnnnnnnnnnnnnnnnnnnnnnnnnnnnnnnnnnnnnnnnnnnnnnnnnnnnnnnnnnnnnnnnnnnnnnnnnnnnnnnnnnnnnnnnnnnnnnnnnnnnnnnnnnnnnnnnnnnnnnnnnnnnnnnnnnnnnnnnnnnnnnnnnnnnnnnnnnnnnnnnnnnnnnnnnnnnnnnnnnnnnnnnnnnnnnnnnnnnnnnnnnnnnnnnnnnnnnnnnnnnnnnnnnnnnnnnnnnnnnnnnnnnnnnnnnnnnnnnnnnnnnnnnnnnnnnnnnnnnnnnnnnnnnnnnnnnnnnnnnnnnnnnnnnnnnnnnnnnnnnnnnnnnnnnnnnnnnnnnnnnnnnnnnnnnnnnnnnnnnnnnnnnnnnnnnnnnnnnnnnnnnnnnnnnnnnnnnnnnnnnnnnnnnnnnnnnnnnnnnnnnnnnnnnnnnnnnnnnnnnnnnnnnnnnnnnnnnnnnnnnnnnnnnnnnnnnnnnnnnnnnnnnnnnnnnnnnnnnnnnnnnnnnnnnnnnnnnnnnnnnnnnnnnnnnnnnnnnnnnnnnnnnnnnnnnnnnnnnnnnnnnnnnnnnnnnnnnnnnnnnnnnnnnnnnnnnnnnnnnnnnnnnnnnnnnnnnnnnnnnnnnnnnnnnnnnnnnnnnnnnnnnnnnnnnnnnnnnnnnnnnnnnnnnnnnnnnnnnnnnnnnnnnnnnnnnnnnnnnnnnnnnnnnnnnnnnnnnnnnnnnnnnnnnnnnnnnnnnnnnnnnnnnnnnnnnnnnnnnnnnnnnnnnnnnnnnnnnnnnnnnnnnnnnnnnnnnnnnnnnnnnnnnnnnnnnnnnnnnnnnnnnnnnnnnnnnnnnnnnnnnnnnnnnnnnnnnnnnnnnnnnnnnnnnnnnnnnnnnnnnnnnnnnnnnnnnnnnnnnnnnnnnnnnnnnnnnnnnnnnnnnnnnnnnnnnnnnnnnnnnnnnnnnnnnnnnnnnnnnnnnnnnnnnnnnnnnnnnnnnnnnnnnnnnnnnnnnnnnnnnnnnnnnnnnnnnnnnnnnnnnnnnnnnnnnnnnnnnnnnnnnnnnnnnnnnnnnnnnnnnnnnnnnnnnnnnnnnnnnnnnnnnnnnnnnnnnnnnnnnnnnnnnnnnnnnnnnnnnnnnnnnnnnnnnnnnnnnnnnnnnnnnnnnnnnnnnnnnnnnnnnnnnnnnnnnnnnnnnnnnnnnnnnnnnnnnnnnnnnnnnnnnnnnnnnnnnnnnnnnnnnnnnnnnnnnnnnnnnnnnnnnnnnnnnnnnnnnnnnnnnnnnnnnnnnnnnnnnnnnnnnnnnnnnnnnnnnnnnnnnnnnnnnnnnnnnnnnnnnnnnnnnnnnnnnnnnnnnnnnnnnnnnnnnnnnnnnnnnnnnnnnnnnnnnnnnnnnnnnnnnnnnnnnnnnnnnnnnnnnnnnnnnnnnnnnnnnnnnnnnnnnnnnnnnnnnnnnnnnnnnnnnnnnnnnnnnnnnnnnnnnnnnnnnnnnnnnnnnnnnnnnnnnnnnnnnnnnnnnnnnnnnnnnnnnnnnnnnnnnnnnnnnnnnnnnnnnnnnnnnnnnnnnnnnnnnnnnnnnnnnnnnnnnnnnnnnnnnnnnnnnnnnnnnnnnnnnnnnnnnnnnnnnnnnnnnnnnnnnnnnnnnnnnnnnnnnnnnnnnnnnnnnnnnnnnnnnnnnnnnnnnnnnnnnnnnnnnnnnnnnnnnnnnnnnnnnnnnnnnnnnnnnnnnnnnnnnnnnnnnnnnnnnnnnnnnnnnnnnnnnnnnnnnnnnnnnnnnnnnnnnnnnnnnnnnnnnnnnnnnnnnnnnnnnnnnnnnnnnnnnnnnnnnnnnnnnnnnnnnnnnnnnnnnnnnnnnnnnnnnnnnnnnnnnnnnnnnnnnnnnnnnnnnnnnnnnnnnnnnnnnnnnnnnnnnnnnnnnnnnnnnnnnnnnnnnnnnnnnnnnnnnnnnnnnnnnnnnnnnnnnnnnnnnnnnnnnnnnnnnnnnnnnnnnnnnnnnnnnnnnnnnnnnnnnnnnnnnnnnnnnnnnnnnnnnnnnnnnnnnnnnnnnnnnnnnnnnnnnnnnnnnnnnnnnnnnnnnnnnnnnnnnnnnnnnnnnnnnnnnnnnnnnnnnnnnnnnnnnnnnnnnnnnnnnnnnnnnnnnnnnnnnnnnnnnnnnnnnnnnnnnnnnnnnnnnnnnnnnnnnnnnnnnnnnnnnnnnnnnnnnnnnnnnnnnnnnnnnnnnnnnnnnnnnnnnnnnnnnnnnnnnnnnnnnnnnnnnnnnnnnnnnnnnnnnnnnnnnnnnnnnnnnnnnnnnnnnnnnnnnnnnnnnnnnnnnnnnnnnnnnnnnnnnnnnnnnnnnnnnnnnnnnnnnnnnnnnnnnnnnnnnnnnnnnnnnnnnnnnnnnnnnnnnnnnnnnnnnnnnnnnnnnnnnnnnnnnnnnnnnnnnnnnnnnnnnnnnnnnnnnnnnnnnnnnnnnnnnnnnnnnnnnnnnnnnnnnnnnnnnnnnnnnnnnnnnnnnnnnnnnnnnnnnnnnnnnnnnnnnnnnnnnnnnnnnnnnnnnnnnnnnnnnnnnnnnnnnnnnnnnnnnnnnnnnnnnnnnnnnnnnnnnnnnnnnnnnnnnnnnnnnnnnnnnnnnnnnnnnnnnnnnnnnnnnnnnnnnnnnnnnnnnnnnnnnnnnnnnnnnnnnnnnnnnnnnnnnnnnnnnnnnnnnnnnnnnnnnnnnnnnnnnnnnnnnnnnnnnnnnnnnnnnnnnnnnnnnnnnnnnnnnnnnnnnnnnnnnnnnnnnnnnnnnnnnnnnnnnnnnnnnnnnnnnnnnnnnnnnnnnnnnnnnnnnnnnnnnnnnnnnnnnnnnnnnnnnnnnnnnnnnnnnnnnnnnnnnnnnnnnnnnnnnnnnnnnnnnnnnnnnnnnnnnnnnnnnnnnnnnnnnnnnnnnnnnnnnnnnnnnnnnnnnnnnnnnnnnnnnnnnnnnnnnnnnnnnnnnnnnnnnnnnnnnnnnnnnnnnnnnnnnnnnnnnnnnnnnnnnnnnnnnnnnnnnnnnnnnnnnnnnnnnnnnnnnnnnnnnnnnnnnnnnnnnnnnnnnnnnnnnnnnnnnnnnnnnnnnnnnnnnnnnnnnnnnnnnnnnnnnnnnnnnnnnnnnnnnnnnnnnnnnnnnnnnnnnnnnnnnnnnnnnnnnnnnnnnnnnnnnnnnnnnnnnnnnnnnnnnnnnnnnnnnnnnnnnnnnnnnnnnnnnnnnnnnnnnnnnnnnnnnnnnnnnnnnnnnnnnnnnnnnnnnnnnnnnnnnnnnnnnnnnnnnnnnnnnnnnnnnnnnnnnnnnnnnnnnnnnnnnnnnnnnnnnnnnnnnnnnnnnnnnnnnnnnnnnnnnnnnnnnnnnnnnnnnnnnnnnnnnnnnnnnnnnnnnnnnnnnnnnnnnnnnnnnnnnnnnnnnnnnnnnnnnnnnnnnnnnnnnnnnnnnnnnnnnnnnnnnnnnnnnnnnnnnnnnnnnnnnnnnnnnnnnnnnnnnnnnnnnnnnnnnnnnnnnnnnnnnnnnnnnnnnnnnnnnnnnnnnnnnnnnnnnnnnnnnnnnnnnnnnnnnnnnnnnnnnnnnnnnnnnnnnnnnnnnnnnnnnnnnnnnnnnnnnnnnnnnnnnnnnnnnnnnnnnnnnnnnnnnnnnnnnnnnnnnnnnnnnnnnnnnnnnnnnnnnnnnnnnnnnnnnnnnnnnnnnnnnnnnnnnnnnnnnnnnnnnnnnnnnnnnnnnnnnnnnnnnnnnnnnnnnnnnnnnnnnnnnnnnnnnnnnnnnnnnnnnnnnnnnnnnnnnnnnnnnnnnnnnnnnnnnnnnnnnnnnnnnnnnnnnnnnnnnnnnnnnnnnnnnnnnnnnnnnnnnnnnnnnnnnnnnnnnnnnnnnnnnnnnnnnnnnnnnnnnnnnnnnnnnnnnnnnnnnnnnnnnnnnnnnnnnnnnnnnnnnnnnnnnnnnnnnnnnnnnnnnnnnnnnnnnnnnnnnnnnnnnnnnnnnnnnnnnnnnnnnnnnnnnnnnnnnnnnnnnnnnnnnnnnnnnnnnnnnnnnnnnnnnnnnnnnnnnnnnnnnnnnnnnnnnnnnnnnnnnnnnnnnnnnnnnnnnnnnnnnnnnnnnnnnnnnnnnnnnnnnnnnnnnnnnnnnnnnnnnnnnnnnnnnnnnnnnnnnnnnnnnnnnnnnnnnnnnnnnnnnnnnnnnnnnnnnnnnnnnnnnnnnnnnnnnnnnnnnnnnnnnnnnnnnnnnnnnnnnnnnnnnnnnnnnnnnnnnnnnnnnnnnnnnnnnnnnnnnnnnnnnnnnnnnnnnnnnnnnnnnnnnnnnnnnnnnnnnnnnnnnnnnnnnnnnnnnnnnnnnnnnnnnnnnnnnnnnnnnnnnnnnnnnnnnnnnnnnnnnnnnnnnnnnnnnnnnnnnnnnnnnnnnnnnnnnnnnnnnnnnnnnnnnnnnnnnnnnnnnnnnnnnnnnnnnnnnnnnnnnnnnnnnnnnnnnnnnnnnnnnnnnnnnnnnnnnnnnnnnnnnnnnnnnnnnnnnnnnnnnnnnnnnnnnnnnnnnnnnnnnnnnnnnnnnnnnnnnnnnnnnnnnnnnnnnnnnnnnnnnnnnnnnnnnnnnnnnnnnnnnnnnnnnnnnnnnnnnnnnnnnnnnnnnnnnnnnnnnnnnnnnnnnnnnnnnnnnnnnnnnnnnnnnnnnnnnnnnnnnnnnnnnnnnnnnnnnnnnnnnnnnnnnnnnnnnnnnnnnnnnnnnnnnnnnnnnnnnnnnnnnnnnnnnnnnnnnnnnnnnnnnnnnnnnnnnnnnnnnnnnnnnnnnnnnnnnnnnnnnnnnnnnnnnnnnnnnnnnnnnnnnnnnnnnnnnnnnnnnnnnnnnnnnnnnnnnnnnnnnnnnnnnnnnnnnnnnnnnnnnnnnnnnnnnnnnnnnnnnnnnnnnnnnnnnnnnnnnnnnnnnnnnnnnnnnnnnnnnnnnnnnnnnnnnnnnnnnnnnnnnnnnnnnnnnnnnnnnnnnnnnnnnnnnnnnnnnnnnnnnnnnnnnnnnnnnnnnnnnnnnnnnnnnnnnnnnnnnnnnnnnnnnnnnnnnnnnnnnnnnnnnnnnnnnnnnnnnnnnnnnnnnnnnnnnnnnnnnnnnnnnnnnnnnnnnnnnnnnnnnnnnnnnnnnnnnnnnnnnnnnnnnnnnnnnnnnnnnnnnnnnnnnnnnnnnnnnnnnnnnnnnnnnnnnnnnnnnnnnnnnnnnnnnnnnnnnnnnnnnnnnnnnnnnnnnnnnnnnnnnnnnnnnnnnnnnnnnnnnnnnnnnnnnnnnnnnnnnnnnnnnnnnnnnnnnnnnnnnnnnnnnnnnnnnnnnnnnnnnnnnnnnnnnnnnnnnnnnnnnnnnnnnnnnnnnnnnnnnnnnnnnnnnnnnnnnnnnnnnnnnnnnnnnnnnnnnnnnnnnnnnnnnnnnnnnnnnnnnnnnnnnnnnnnnnnnnnnnnnnnnnnnnnnnnnnnnnnnnnnnnnnnnnnnnnnnnnnnnnnnnnnnnnnnnnnnnnnnnnnnnnnnnnnnnnnnnnnnnnnnnnnnnnnnnnnnnnnnnnnnnnnnnnnnnnnnnnnnnnnnnnnnnnnnnnnnnnnnnnnnnnnnnnnnnnnnnnnnnnnnnnnnnnnnnnnnnnnnnnnnnnnnnnnnnnnnnnnnnnnnnnnnnnnnnnnnnnnnnnnnnnnnnnnnnnnnnnnnnnnnnnnnnnnnnnnnnnnnnnnnnnnnnnnnnnnnnnnnnnnnnnnnnnnnnnnnnnnnnnnnnnnnnnnnnnnnnnnnnnnnnnnnnnnnnnnnnnnnnnnnnnnnnnnnnnnnnnnnnnnnnnnnnnnnnnnnnnnnnnnnnnnnnnnnnnnnnnnnnnnnnnnnnnnnnnnnnnnnnnnnnnnnnnnnnnnnnnnnnnnnnnnnnnnnnnnnnnnnnnnnnnnnnnnnnnnnnnnnnnnnnnnnnnnnnnnnnnnnnnnnnnnnnnnnnnnnnnnnnnnnnnnnnnnnnnnnnnnnnnnnnnnnnnnnnnnnnnnnnnnnnnnnnnnnnnnnnnnnnnnnnnnnnnnnnnnnnnnnnnnnnnnnnnnnnnnnnnnnnnnnnnnnnnnnnnnnnnnnnnnnnnnnnnnnnnnnnnnnnnnnnnnnnnnnnnnnnnnnnnnnnnnnnnnnnnnnnnnnnnnnnnnnnnnnnnnnnnnnnnnnnnnnnnnnnnnnnnnnnnnnnnnnnnnnnnnnnnnnnnnnnnnnnnnnnnnnnnnnnnnnnnnnnnnnnnnnnnnnnnnnnnnnnnnnnnnnnnnnnnnnnnnnnnnnnnnnnnnnnnnnnnnnnnnnnnnnnnnnnnnnnnnnnnnnnnnnnnnnnnnnnnnnnnnnnnnnnnnnnnnnnnnnnnnnnnnnnnnnnnnnnnnnnnnnnnnnnnnnnnnnnnnnnnnnnnnnnnnnnnnnnnnnnnnnnnnnnnnnnnnnnnnnnnnnnnnnnnnnnnnnnnnnnnnnnnnnnnnnnnnnnnnnnnnnnnnnnnnnnnnnnnnnnnnnnnnnnnnnnnnnnnnnnnnnnnnnnnnnnnnnnnnnnnnnnnnnnnnnnnnnnnnnnnnnnnnnnnnnnnnnnnnnnnnnnnnnnnnnnnnnnnnnnnnnnnnnnnnnnnnnnnnnnnnnnnnnnnnnnnnnnnnnnnnnnnnnnnnnnnnnnnnnnnnnnnnnnnnnnnnnnnnnnnnnnnnnnnnnnnnnnnnnnnnnnnnnnnnnnnnnnnnnnnnnnnnnnnnnnnnnnnnnnnnnnnnnnnnnnnnnnnnnnnnnnnnnnnnnnnnnnnnnnnnnnnnnnnnnnnnnnnnnnnnnnnnnnnnnnnnnnnnnnnnnnnnnnnnnnnnnnnnnnnnnnnnnnnnnnnnnnnnnnnnnnnnnnnnnnnnnnnnnnnnnnnnnnnnnnnnnnnnnnnnnnnnnnnnnnnnnnnnnnnnnnnnnnnnnnnnnnnnnnnnnnnnnnnnnnnnnnnnnnnnnnnnnnnnnnnnnnnnnnnnnnnnnnnnnnnnnnnnnnnnnnnnnnnnnnnnnnnnnnnnnnnnnnnnnnnnnnnnnnnnnnnnnnnnnnnnnnnnnnnnnnnnnnnnnnnnnnnnnnnnnnnnnnnnnnnnnnnnnnnnnnnnnnnnnnnnnnnnnnnnnnnnnnnnnnnnnnnnnnnnnnnnnnnnnnnnnnnnnnnnnnnnnnnnnnnnnnnnnnnnnnnnnnnnnnnnnnnnnnnnnnnnnnnnnnnnnnnnnnnnnnnnnnnnnnnnnnnnnnnnnnnnnnnnnnnnnnnnnnnnnnnnnnnnnnnnnnnnnnnnnnnnnnnnnnnnnnnnnnnnnnnnnnnnnnnnnnnnnnnnnnnnnnnnnnnnnnnnnnnnnnnnnnnnnnnnnnnnnnnnnnnnnnnnnnnnnnnnnnnnnnnnnnnnnnnnnnnnnnnnnnnnnnnnnnnnnnnnnnnnnnnnnnnnnnnnnnnnnnnnnnnnnnnnnnnnnnnnnnnnnnnnnnnnnnnnnnnnnnnnnnnnnnnnnnnnnnnnnnnnnnnnnnnnnnnnnnnnnnnnnnnnnnnnnnnnnnnnnnnnnnnnnnnnnnnnnnnnnnnnnnnnnnnnnnnnnnnnnnnnnnnnnnnnnnnnnnnnnnnnnnnnnnnnnnnnnnnnnnnnnnnnnnnnnnnnnnnnnnnnnnnnnnnnnnnnnnnnnnnnnnnnnnnnnnnnnnnnnnnnnnnnnnnnnnnnnnnnnnnnnnnnnnnnnnnnnnnnnnnnnnnnnnnnnnnnnnnnnnnnnnnnnnnnnnnnnnnnnnnnnnnnnnnnnnnnnnnnnnnnnnnnnnnnnnnnnnnnnnnnnnnnnnnnnnnnnnnnnnnnnnnnnnnnnnnnnnnnnnnnnnnnnnnnnnnnnnnnnnnnnnnnnnnnnnnnnnnnnnnnnnnnnnnnnnnnnnnnnnnnnnnnnnnnnnnnnnnnnnnnnnnnnnnnnnnnnnnnnnnnnnnnnnnnnnnnnnnnnnnnnnnnnnnnnnnnnnnnnnnnnnnnnnnnnnnnnnnnnnnnnnnnnnnnnnnnnnnnnnnnnnnnnnnnnnnnnnnnnnnnnnnnnnnnnnnnnnnnnnnnnnnnnnnnnnnnnnnnnnnnnnnnnnnnnnnnnnnnnnnnnnnnnnnnnnnnnnnnnnnnnnnnnnnnnnnnnnnnnnnnnnnnnnnnnnnnnnnnnnnnnnnnnnnnnnnnnnnnnnnnnnnnnnnnnnnnnnnnnnnnnnnnnnnnnnnnnnnnnnnnnnnnnnnnnnnnnnnnnnnnnnnnnnnnnnnnnnnnnnnnnnnnnnnnnnnnnnnnnnnnnnnnnnnnnnnnnnnnnnnnnnnnnnnnnnnnnnnnnnnnnnnnnnnnnnnnnnnnnnnnnnnnnnnnnnnnnnnnnnnnnnnnnnnnnnnnnnnnnnnnnnnnnnnnnnnnnnnnnnnnnnnnnnnnnnnnnnnnnnnnnnnnnnnnnnnnnnnnnnnnnnnnnnnnnnnnnnnnnnnnnnnnnnnnnnnnnnnnnnnnnnnnnnnnnnnnnnnnnnnnnnnnnnnnnnnnnnnnnnnnnnnnnnnnnnnnnnnnnnnnnnnnnnnnnnnnnnnnnnnnnnnnnnnnnnnnnnnnnnnnnnnnnnnnnnnnnnnnnnnnnnnnnnnnnnnnnnnnnnnnnnnnnnnnnnnnnnnnnnnnnnnnnnnnnnnnnnnnnnnnnnnnnnnnnnnnnnnnnnnnnnnnnnnnnnnnnnnnnnnnnnnnnnnnnnnnnnnnnnnnnnnnnnnnnnnnnnnnnnnnnnnnnnnnnnnnnnnnnnnnnnnnnnnnnnnnnnnnnnnnnnnnnnnnnnnnnnnnnnnnnnnnnnnnnnnnnnnnnnnnnnnnnnnnnnnnnnnnnnnnnnnnnnnnnnnnnnnnnnnnnnnnnnnnnnnnnnnnnnnnnnnnnnnnnnnnnnnnnnnnnnnnnnnnnnnnnnnnnnnnnnnnnnnnnnnnnnnnnnnnnnnnnnnnnnnnnnnnnnnnnnnnnnnnnnnnnnnnnnnnnnnnnnnnnnnnnnnnnnnnnnnnnnnnnnnnnnnnnnnnnnnnnnnnnnnnnnnnnnnnnnnnnnnnnnnnnnnnnnnnnnnnnnnnnnnnnnnnnnnnnnnnnnnnnnnnnnnnnnnnnnnnnnnnnnnnnnnnnnnnnnnnnnnnnnnnnnnnnnnnnnnnnnnnnnnnnnnnnnnnnnnnnnnnnnnnnnnnnnnnnnnnnnnnnnnnnnnnnnnnnnnnnnnnnnnnnnnnnnnnnnnnnnnnnnnnnnnnnnnnnnnnnnnnnnnnnnnnnnnnnnnnnnnnnnnnnnnnnnnnnnnnnnnnnnnnnnnnnnnnnnnnnnnnnnnnnnnnnnnnnnnnnnnnnnnnnnnnnnnnnnnnnnnnnnnnnnnnnnnnnnnnnnnnnnnnnnnnnnnnnnnnnnnnnnnnnnnnnnnnnnnnnnnnnnnnnnnnnnnnnnnnnnnnnnnnnnnnnnnnnnnnnnnnnnnnnnnnnnnnnnnnnnnnnnnnnnnnnnnnnnnnnnnnnnnnnnnnnnnnnnnnnnnnnnnnnnnnnnnnnnnnnnnnnnnnnnnnnnnnnnnnnnnnnnnnnnnnnnnnnnnnnnnnnnnnnnnnnnnnnnnnnnnnnnnnnnnnnnnnnnnnnnnnnnnnnnnnnnnnnnnnnnnnnnnnnnnnnnnnnnnnnnnnnnnnnnnnnnnnnnnnnnnnnnnnnnnnnnnnnnnnnnnnnnnnnnnnnnnnnnnnnnnnnnnnnnnnnnnnnnnnnnnnnnnnnnnnnnnnnnnnnnnnnnnnnnnnnnnnnnnnnnnnnnnnnnnnnnnnnnnnnnnnnnnnnnnnnnnnnnnnnnnnnnnnnnnnnnnnnnnnnnnnnnnnnnnnnnnnnnnnnnnnnnnnnnnnnnnnnnnnnnnnnnnnnnnnnnnnnnnnnnnnnnnnnnnnnnnnnnnnnnnnnnnnnnnnnnnnnnnnnnnnnnnnnnnnnnnnnnnnnnnnnnnnnnnnnnnnnnnnnnnnnnnnnnnnnnnnnnnnnnnnnnnnnnnnnnnnnnnnnnnnnnnnnnnnnnnnnnnnnnnnnnnnnnnnnnnnnnnnnnnnnnnnnnnnnnnnnnnnnnnnnnnnnnnnnnnnnnnnnnnnnnnnnnnnnnnnnnnnnnnnnnnnnnnnnnnnnnnnnnnnnnnnnnnnnnnnnnnnnnnnnnnnnnnnnnnnnnnnnnnnnnnnnnnnnnnnnnnnnnnnnnnnnnnnnnnnnnnnnnnnnnnnnnnnnnnnnnnnnnnnnnnnnnnnnnnnnnnnnnnnnnnnnnnnnnnnnnnnnnnnnnnnnnnnnnnnnnnnnnnnnnnnnnnnnnnnnnnnnnnnnnnnnnnnnnnnnnnnnnnnnnnnnnnnnnnnnnnnnnnnnnnnnnnnnnnnnnnnnnnnnnnnnnnnnnnnnnnnnnnnnnnnnnnnnnnnnnnnnnnnnnnnnnnnnnnnnnnnnnnnnnnnnnnnnnnnnnnnnnnnnnnnnnnnnnnnnnnnnnnnnnnnnnnnnnnnnnnnnnnnnnnnnnnnnnnnnnnnnnnnnnnnnnnnnnnnnnnnnnnnnnnnnnnnnnnnnnnnnnnnnnnnnnnnnnnnnnnnnnnnnnnnnnnnnnnnnnnnnnnnnnnnnnnnnnnnnnnnnnnnnnnnnnnnnnnnnnnnnnnnnnnnnnnnnnnnnnnnnnnnnnnnnnnnnnnnnnnnnnnnnnnnnnnnnnnnnnnnnnnnnnnnnnnnnnnnnnnnnnnnnnnnnnnnnnnnnnnnnnnnnnnnnnnnnnnnnnnnnnnnnnnnnnnnnnnnnnnnnnnnnnnnnnnnnnnnnnnnnnnnnnnnnnnnnnnnnnnnnnnnnnnnnnnnnnnnnnnnnnnnnnnnnnnnnnnnnnnnnnnnnnnnnnnnnnnnnnnnnnnnnnnnnnnnnnnnnnnnnnnnnnnnnnnnnnnnnnnnnnnnnnnnnnnnnnnnnnnnnnnnnnnnnnnnnnnnnnnnnnnnnnnnnnnnnnnnnnnnnnnnnnnnnnnnnnnnnnnnnnnnnnnnnnnnnnnnnnnnnnnnnnnnnnnnnnnnnnnnnnnnnnnnnnnnnnnnnnnnnnnnnnnnnnnnnnnnnnnnnnnnnnnnnnnnnnnnnnnnnnnnnnnnnnnnnnnnnnnnnnnnnnnnnnnnnnnnnnnnnnnnnnnnnnnnnnnnnnnnnnnnnnnnnnnnnnnnnnnnnnnnnnnnnnnnnnnnnnnnnnnnnnnnnnnnnnnnnnnnnnnnnnnnnnnnnnnnnnnnnnnnnnnnnnnnnnnnnnnnnnnnnnnnnnnnnnnnnnnnnnnnnnnnnnnnnnnnnnnnnnnnnnnnnnnnnnnnnnnnnnnnnnnnnnnnnnnnnnnnnnnnnnnnnnnnnnnnnnnnnnnnnnnnnnnnnnnnnnnnnnnnnnnnnnnnnnnnnnnnnnnnnnnnnnnnnnnnnnnnnnnnnnnnnnnnnnnnnnnnnnnnnnnnnnnnnnnnnnnnnnnnnnnnnnnnnnnnnnnnnnnnnnnnnnnnnnnnnnnnnnnnnnnnnnnnnnnnnnnnnnnnnnnnnnnnnnnnnnnnnnnnnnnnnnnnnnnnnnnnnnnnnnnnnnnnnnnnnnnnnnnnnnnnnnnnnnnnnnnnnnnnnnnnnnnnnnnnnnnnnnnnnnnnnnnnnnnnnnnnnnnnnnnnnnnnnnnnnnnnnnnnnnnnnnnnnnnnnnnnnnnnnnnnnnnnnnnnnnnnnnnnnnnnnnnnnnnnnnnnnnnnnnnnnnnnnnnnnnnnnnnnnnnnnnnnnnnnnnnnnnnnnnnnnnnnnnnnnnnnnnnnnnnnnnnnnnnnnnnnnnnnnnnnnnnnnnnnnnnnnnnnnnnnnnnnnnnnnnnnnnnnnnnnnnnnnnnnnnnnnnnnnnnnnnnnnnnnnnnnnnnnnnnnnnnnnnnnnnnnnnnnnnnnnnnnnnnnnnnnnnnnnnnnnnnnnnnnnnnnnnnnnnnnnnnnnnnnnnnnnnnnnnnnnnnnnnnnnnnnnnnnnnnnnnnnnnnnnnnnnnnnnnnnnnnnnnnnnnnnnnnnnnnnnnnnnnnnnnnnnnnnnnnnnnnnnnnnnnnnnnnnnnnnnnnnnnnnnnnnnnnnnnnnnnnnnnnnnnnnnnnnnnnnnnnnnnnnnnnnnnnnnnnnnnnnnnnnnnnnnnnnnnnnnnnnnnnnnnnnnnnnnnnnnnnnnnnnnnnnnnnnnnnnnnnnnnnnnnnnnnnnnnnnnnnnnnnnnnnnnnnnnnnnnnnnnnnnnnnnnnnnnnnnnnnnnnnnnnnnnnnnnnnnnnnnnnnnnnnnnnnnnnnnnnnnnnnnnnnnnnnnnnnnnnnnnnnnnnnnnnnnnnnnnnnnnnnnnnnnnnnnnnnnnnnnnnnnnnnnnnnnnnnnnnnnnnnnnnnnnnnnnnnnnnnnnnnnnnnnnnnnnnnnnnnnnnnnnnnnnnnnnnnnnnnnnnnnnnnnnnnnnnnnnnnnnnnnnnnnnnnnnnnnnnnnnnnnnnnnnnnnnnnnnnnnnnnnnnnnnnnnnnnnnnnnnnnnnnnnnnnnnnnnnnnnnnnnnnnnnnnnnnnnnnnnnnnnnnnnnnnnnnnnnnnnnnnnnnnnnnnnnnnnnnnnnnnnnnnnnnnnnnnnnnnnnnnnnnnnnnnnnnnnnnnnnnnnnnnnnnnnnnnnnnnnnnnnnnnnnnnnnnnnnnnnnnnnnnnnnnnnnnnnnnnnnnnnnnnnnnnnnnnnnnnnnnnnnnnnnnnnnnnnnnnnnnnnnnnnnnnnnnnnnnnnnnnnnnnnnnnnnnnnnnnnnnnnnnnnnnnnnnnnnnnnnnnnnnnnnnnnnnnnnnnnnnnnnnnnnnnnnnnnnnnnnnnnnnnnnnnnnnnnnnnnnnnnnnnnnnnnnnnnnnnnnnnnnnnnnnnnnnnnnnnnnnnnnnnnnnnnnnnnnnnnnnnnnnnnnnnnnnnnnnnnnnnnnnnnnnnnnnnnnnnnnnnnnnnnnnnnnnnnnnnnnnnnnnnnnnnnnnnnnnnnnnnnnnnnnnnnnnnnnnnnnnnnnnnnnnnnnnnnnnnnnnnnnnnnnnnnnnnnnnnnnnnnnnnnnnnnnnnnnnnnnnnnnnnnnnnnnnnnnnnnnnnnnnnnnnnnnnnnnnnnnnnnnnnnnnnnnnnnnnnnnnnnnnnnnnnnnnnnnnnnnnnnnnnnnnnnnnnnnnnnnnnnnnnnnnnnnnnnnnnnnnnnnnnnnnnnnnnnnnnnnnnnnnnnnnnnnnnnnnnnnnnnnnnnnnnnnnnnnnnnnnnnnnnnnnnnnnnnnnnnnnnnnnnnnnnnnnnnnnnnnnnnnnnnnnnnnnnnnnnnnnnnnnnnnnnnnnnnnnnnnnnnnnnnnnnnnnnnnnnnnnnnnnnnnnnnnnnnnnnnnnnnnnnnnnnnnnnnnnnnnnnnnnnnnnnnnnnnnnnnnnnnnnnnnnnnnnnnnnnnnnnnnnnnnnnnnnnnnnnnnnnnnnnnnnnnnnnnnnnnnnnnnnnnnnnnnnnnnnnnnnnnnnnnnnnnnnnnnnnnnnnnnnnnnnnnnnnnnnnnnnnnnnnnnnnnnnnnnnnnnnnnnnnnnnnnnnnnnnnnnnnnnnnnnnnnnnnnnnnnnnnnnnnnnnnnnnnnnnnnnnnnnnnnnnnnnnnnnnnnnnnnnnnnnnnnnnnnnnnnnnnnnnnnnnnnnnnnnnnnnnnnnnnnnnnnnnnnnnnnnnnnnnnnnnnnnnnnnnnnnnnnnnnnnnnnnnnnnnnnnnnnnnnnnnnnnnnnnnnnnnnnnnnnnnnnnnnnnnnnnnnnnnnnnnnnnnnnnnnnnnnnnnnnnnnnnnnnnnnnnnnnnnnnnnnnnnnnnnnnnnnnnnnnnnnnnnnnnnnnnnnnnnnnnnnnnnnnnnnnnnnnnnnnnnnnnnnnnnnnnnnnnnnnnnnnnnnnnnnnnnnnnnnnnnnnnnnnnnnnnnnnnnnnnnnnnnnnnnnnnnnnnnnnnnnnnnnnnnnnnnnnnnnnnnnnnnnnnnnnnnnnnnnnnnnnnnnnnnnnnnnnnnnnnnnnnnnnnnnnnnnnnnnnnnnnnnnnnnnnnnnnnnnnnnnnnnnnnnnnnnnnnnnnnnnnnnnnnnnnnnnnnnnnnnnnnnnnnnnnnnnnnnnnnnnnnnnnnnnnnnnnnnnnnnnnnnnnnnnnnnnnnnnnnnnnnnnnnnnnnnnnnnnnnnnnnnnnnnnnnnnnnnnnnnnnnnnnnnnnnnnnnnnnnnnnnnnnnnnnnnnnnnnnnnnnnnnnnnnnnnnnnnnnnnnnnnnnnnnnnnnnnnnnnnnnnnnnnnnnnnnnnnnnnnnnnnnnnnnnnnnnnnnnnnnnnnnnnnnnnnnnnnnnnnnnnnnnnnnnnnnnnnnnnnnnnnnnnnnnnnnnnnnnnnnnnnnnnnnnnnnnnnnnnnnnnnnnnnnnnnnnnnnnnnnnnnnnnnnnnnnnnnnnnnnnnnnnnnnnnnnnnnnnnnnnnnnnnnnnnnnnnnnnnnnnnnnnnnnnnnnnnnnnnnnnnnnnnnnnnnnnnnnnnnnnnnnnnnnnnnnnnnnnnnnnnnnnnnnnnnnnnnnnnnnnnnnnnnnnnnnnnnnnnnnnnnnnnnnnnnnnnnnnnnnnnnnnnnnnnnnnnnnnnnnnnnnnnnnnnnnnnnnnnnnnnnnnnnnnnnnnnnnnnnnnnnnnnnnnnnnnnnnnnnnnnnnnnnnnnnnnnnnnnnnnnnnnnnnnnnnnnnnnnnnnnnnnnnnnnnnnnnnnnnnnnnnnnnnnnnnnnnnnnnnnnnnnnnnnnnnnnnnnnnnnnnnnnnnnnnnnnnnnnnnnnnnnnnnnnnnnnnnnnnnnnnnnnnnnnnnnnnnnnnnnnnnnnnnnnnnnnnnnnnnnnnnnnnnnnnnnnnnnnnnnnnnnnnnnnnnnnnnnnnnnnnnnnnnnnnnnnnnnnnnnnnnnnnnnnnnnnnnnnnnnnnnnnnnnnnnnnnnnnnnnnnnnnnnnnnnnnnnnnnnnnnnnnnnnnnnnnnnnnnnnnnnnnnnnnnnnnnnnnnnnnnnnnnnnnnnnnnnnnnnnnnnnnnnnnnnnnnnnnnnnnnnnnnnnnnnnnnnnnnnnnnnnnnnnnnnnnnnnnnnnnnnnnnnnnnnnnnnnnnnnnnnnnnnnnnnnnnnnnnnnnnnnnnnnnnnnnnnnnnnnnnnnnnnnnnnnnnnnnnnnnnnnnnnnnnnnnnnnnnnnnnnnnnnnnnnnnnnnnnnnnnnnnnnnnnnnnnnnnnnnnnnnnnnnnnnnnnnnnnnnnnnnnnnnnnnnnnnnnnnnnnnnnnnnnnnnnnnnnnnnnnnnnnnnnnnnnnnnnnnnnnnnnnnnnnnnnnnnnnnnnnnnnnnnnnnnnnnnnnnnnnnnnnnnnnnnnnnnnnnnnnnnnnnnnnnnnnnnnnnnnnnnnnnnnnnnnnnnnnnnnnnnnnnnnnnnnnnnnnnnnnnnnnnnnnnnnnnnnnnnnnnnnnnnnnnnnnnnnnnnnnnnnnnnnnnnnnnnnnnnnnnnnnnnnnnnnnnnnnnnnnnnnnnnnnnnnnnnnnnnnnnnnnnnnnnnnnnnnnnnnnnnnnnnnnnnnnnnnnnnnnnnnnnnnnnnnnnnnnnnnnnnnnnnnnnnnnnnnnnnnnnnnnnnnnnnnnnnnnnnnnnnnnnnnnnnnnnnnnnnnnnnnnnnnnnnnnnnnnnnnnnnnnnnnnnnnnnnnnnnnnnnnnnnnnnnnnnnnnnnnnnnnnnnnnnnnnnnnnnnnnnnnnnnnnnnnnnnnnnnnnnnnnnnnnnnnnnnnnnnnnnnnnnnnnnnnnnnnnnnnnnnnnnnnnnnnnnnnnnnnnnnnnnnnnnnnnnnnnnnnnnnnnnnnnnnnnnnnnnnnnnnnnnnnnnnnnnnnnnnnnnnnnnnnnnnnnnnnnnnnnnnnnnnnnnnnnnnnnnnnnnnnnnnnnnnnnnnnnnnnnnnnnnnnnnnnnnnnnnnnnnnnnnnnnnnnnnnnnnnnnnnnnnnnnnnnnnnnnnnnnnnnnnnnnnnnnnnnnnnnnnnnnnnnnnnnnnnnnnnnnnnnnnnnnnnnnnnnnnnnnnnnnnnnnnnnnnnnnnnnnnnnnnnnnnnnnnnnnnnnnnnnnnnnnnnnnnnnnnnnnnnnnnnnnnnnnnnnnnnnnnnnnnnnnnnnnnnnnnnnnnnnnnnnnnnnnnnnnnnnnnnnnnnnnnnnnnnnnnnnnnnnnnnnnnnnnnnnnnnnnnnnnnnnnnnnnnnnnnnnnnnnnnnnnnnnnnnnnnnnnnnnnnnnnnnnnnnnnnnnnnnnnnnnnnnnnnnnnnnnnnnnnnnnnnnnnnnnnnnnnnnnnnnnnnnnnnnnnnnnnnnnnnnnnnnnnnnnnnnnnnnnnnnnnnnnnnnnnnnnnnnnnnnnnnnnnnnnnnnnnnnnnnnnnnnnnnnnnnnnnnnnnnnnnnnnnnnnnnnnnnnnnnnnnnnnnnnnnnnnnnnnnnnnnnnnnnnnnnnnnnnnnnnnnnnnnnnnnnnnnnnnnnnnnnnnnnnnnnnnnnnnnnnnnnnnnnnnnnnnnnnnnnnnnnnnnnnnnnnnnnnnnnnnnnnnnnnnnnnnnnnnnnnnnnnnnnnnnnnnnnnnnnnnnnnnnnnnnnnnnnnnnnnnnnnnnnnnnnnnnnnnnnnnnnnnnnnnnnnnnnnnnnnnnnnnnnnnnnnnnnnnnnnnnnnnnnnnnnnnnnnnnnnnnnnnnnnnnnnnnnnnnnnnnnnnnnnnnnnnnnnnnnnnnnnnnnnnnnnnnnnnnnnnnnnnnnnnnnnnnnnnnnnnnnnnnnnnnnnnnnnnnnnnnnnnnnnnnnnnnnnnnnnnnnnnnnnnnnnnnnnnnnnnnnnnnnnnnnnnnnnnnnnnnnnnnnnnnnnnnnnnnnnnnnnnnnnnnnnnnnnnnnnnnnnnnnnnnnnnnnnnnnnnnnnnnnnnnnnnnnnnnnnnnnnnnnnnnnnnnnnnnnnnnnnnnnnnnnnnnnnnnnnnnnnnnnnnnnnnnnnnnnnnnnnnnnnnnnnnnnnnnnnnnnnnnnnnnnnnnnnnnnnnnnnnnnnnnnnnnnnnnnnnnnnnnnnnnnnnnnnnnnnnnnnnnnnnnnnnnnnnnnnnnnnnnnnnnnnnnnnnnnnnnnnnnnnnnnnnnnnnnnnnnnnnnnnnnnnnnnnnnnnnnnnnnnnnnnnnnnnnnnnnnnnnnnnnnnnnnnnnnnnnnnnnnnnnnnnnnnnnnnnnnnnnnnnnnnnnnnnnnnnnnnnnnnnnnnnnnnnnnnnnnnnnnnnnnnnnnnnnnnnnnnnnnnnnnnnnnnnnnnnnnnnnnnnnnnnnnnnnnnnnnnnnnnnnnnnnnnnnnnnnnnnnnnnnnnnnnnnnnnnnnnnnnnnnnnnnnnnnnnnnnnnnnnnnnnnnnnnnnnnnnnnnnnnnnnnnnnnnnnnnnnnnnnnnnnnnnnnnnnnnnnnnnnnnnnnnnnnnnnnnnnnnnnnnnnnnnnnnnnnnnnnnnnnnnnnnnnnnnnnnnnnnnnnnnnnnnnnnnnnnnnnnnnnnnnnnnnnnnnnnnnnnnnnnnnnnnnnnnnnnnnnnnnnnnnnnnnnnnnnnnnnnnnnnnnnnnnnnnnnnnnnnnnnnnnnnnnnnnnnnnnnnnnnnnnnnnnnnnnnnnnnnnnnnnnnnnnnnnnnnnnnnnnnnnnnnnnnnnnnnnnnnnnnnnnnnnnnnnnnnnnnnnnnnnnnnnnnnnnnnnnnnnnnnnnnnnnnnnnnnnnnnnnnnnnnnnnnnnnnnnnnnnnnnnnnnnnnnnnnnnnnnnnnnnnnnnnnnnnnnnnnnnnnnnnnnnnnnnnnnnnnnnnnnnnnnnnnnnnnnnnnnnnnnnnnnnnnnnnnnnnnnnnnnnnnnnnnnnnnnnnnnnnnnnnnnnnnnnnnnnnnnnnnnnnnnnnnnnnnnnnnnnnnnnnnnnnnnnnnnnnnnnnnnnnnnnnnnnnnnnnnnnnnnnnnnnnnnnnnnnnnnnnnnnnnnnnnnnnnnnnnnnnnnnnnnnnnnnnnnnnnnnnnnnnnnnnnnnnnnnnnnnnnnnnnnnnnnnnnnnnnnnnnnnnnnnnnnnnnnnnnnnnnnnnnnnnnnnnnnnnnnnnnnnnnnnnnnnnnnnnnnnnnnnnnnnnnnnnnnnnnnnnnnnnnnnnnnnnnnnnnnnnnnnnnnnnnnnnnnnnnnnnnnnnnnnnnnnnnnnnnnnnnnnnnnnnnnnnnnnnnnnnnnnnnnnnnnnnnnnnnnnnnnnnnnnnnnnnnnnnnnnnnnnnnnnnnnnnnnnnnnnnnnnnnnnnnnnnnnnnnnnnnnnnnnnnnnnnnnnnnnnnnnnnnnnnnnnnnnnnnnnnnnnnnnnnnnnnnnnnnnnnnnnnnnnnnnnnnnnnnnnnnnnnnnnnnnnnnnnnnnnnnnnnnnnnnnnnnnnnnnnnnnnnnnnnnnnnnnnnnnnnnnnnnnnnnnnnnnnnnnnnnnnnnnnnnnnnnnnnnnnnnnnnnnnnnnnnnnnnnnnnnnnnnnnnnnnnnnnnnnnnnnnnnnnnnnnnnnnnnnnnnnnnnnnnnnnnnnnnnnnnnnnnnnnnnnnnnnnnnnnnnnnnnnnnnnnnnnnnnnnnnnnnnnnnnnnnnnnnnnnnnnnnnnnnnnnnnnnnnnnnnnnnnnnnnnnnnnnnnnnnnnnnnnnnnnnnnnnnnnnnnnnnnnnnnnnnnnnnnnnnnnnnnnnnnnnnnnnnnnnnnnnnnnnnnnnnnnnnnnnnnnnnnnnnnnnnnnnnnnnnnnnnnnnnnnnnnnnnnnnnnnnnnnnnnnnnnnnnnnnnnnnnnnnnnnnnnnnnnnnnnnnnnnnnnnnnnnnnnnnnnnnnnnnnnnnnnnnnnnnnnnnnnnnnnnnnnnnnnnnnnnnnnnnnnnnnnnnnnnnnnnnnnnnnnnnnnnnnnnnnnnnnnnnnnnnnnnnnnnnnnnnnnnnnnnnnnnnnnnnnnnnnnnnnnnnnnnnnnnnnnnnnnnnnnnnnnnnnnnnnnnnnnnnnnnnnnnnnnnnnnnnnnnnnnnnnnnnnnnnnnnnnnnnnnnnnnnnnnnnnnnnnnnnnnnnnnnnnnnnnnnnnnnnnnnnnnnnnnnnnnnnnnnnnnnnnnnnnnnnnnnnnnnnnnnnnnnnnnnnnnnnnnnnnnnnnnnnnnnnnnnnnnnnnnnnnnnnnnnnnnnnnnnnnnnnnnnnnnnnnnnnnnnnnnnnnnnnnnnnnnnnnnnnnnnnnnnnnnnnnnnnnnnnnnnnnnnnnnnnnnnnnnnnnnnnnnnnnnnnnnnnnnnnnnnnnnnnnnnnnnnnnnnnnnnnnnnnnnnnnnnnnnnnnnnnnnnnnnnnnnnnnnnnnnnnnnnnnnnnnnnnnnnnnnnnnnnnnnnnnnnnnnnnnnnnnnnnnnnnnnnnnnnnnnnnnnnnnnnnnnnnnnnnnnnnnnnnnnnnnnnnnnnnnnnnnnnnnnnnnnnnnnnnnnnnnnnnnnnnnnnnnnnnnnnnnnnnnnnnnnnnnnnnnnnnnnnnnnnnnnnnnnnnnnnnnnnnnnnnnnnnnnnnnnnnnnnnnnnnnnnnnnnnnnnnnnnnnnnnnnnnnnnnnnnnnnnnnnnnnnnnnnnnnnnnnnnnnnnnnnnnnnnnnnnnnnnnnnnnnnnnnnnnnnnnnnnnnnnnnnnnnnnnnnnnnnnnnnnnnnnnnnnnnnnnnnnnnnnnnnnnnnnnnnnnnnnnnnnnnnnnnnnnnnnnnnnnnnnnnnnnnnnnnnnnnnnnnnnnnnnnnnnnnnnnnnnnnnnnnnnnnnnnnnnnnnnnnnnnnnnnnnnnnnnnnnnnnnnnnnnnnnnnnnnnnnnnnnnnnnnnnnnnnnnnnnnnnnnnnnnnnnnnnnnnnnnnnnnnnnnnnnnnnnnnnnnnnnnnnnnnnnnnnnnnnnnnnnnnnnnnnnnnnnnnnnnnnnnnnnnnnnnnnnnnnnnnnnnnnnnnnnnnnnnnnnnnnnnnnnnnnnnnnnnnnnnnnnnnnnnnnnnnnnnnnnnnnnnnnnnnnnnnnnnnnnnnnnnnnnnnnnnnnnnnnnnnnnnnnnnnnnnnnnnnnnnnnnnnnnnnnnnnnnnnnnnnnnnnnnnnnnnnnnnnnnnnnnnnnnnnnnnnnnnnnnnnnnnnnnnnnnnnnnnnnnnnnnnnnnnnnnnnnnnnnnnnnnnnnnnnnnnnnnnnnnnnnnnnnnnnnnnnnnnnnnnnnnnnnnnnnnnnnnnnnnnnnnnnnnnnnnnnnnnnnnnnnnnnnnnnnnnnnnnnnnnnnnnnnnnnnnnnnnnnnnnnnnnnnnnnnnnnnnnnnnnnnnnnnnnnnnnnnnnnnnnnnnnnnnnnnnnnnnnnnnnnnnnnnnnnnnnnnnnnnnnnnnnnnnnnnnnnnnnnnnnnnnnnnnnnnnnnnnnnnnnnnnnnnnnnnnnnnnnnnnnnnnnnnnnnnnnnnnnnnnnnnnnnnnnnnnnnnnnnnnnnnnnnnnnnnnnnnnnnnnnnnnnnnnnnnnnnnnnnnnnnnnnnnnnnnnnnnnnnnnnnnnnnnnnnnnnnnnnnnnnnnnnnnnnnnnnnnnnnnnnnnnnnnnnnnnnnnnnnnnnnnnnnnnnnnnnnnnnnnnnnnnnnnnnnnnnnnnnnnnnnnnnnnnnnnnnnnnnnnnnnnnnnnnnnnnnnnnnnnnnnnnnnnnnnnnnnnnnnnnnnnnnnnnnnnnnnnnnnnnnnnnnnnnnnnnnnnnnnnnnnnnnnnnnnnnnnnnnnnnnnnnnnnnnnnnnnnnnnnnnnnnnnnnnnnnnnnnnnnnnnnnnnnnnnnnnnnnnnnnnnnnnnnnnnnnnnnnnnnnnnnnnnnnnnnnnnnnnnnnnnnnnnnnnnnnnnnnnnnnnnnnnnnnnnnnnnnnnnnnnnnnnnnnnnnnnnnnnnnnnnnnnnnnnnnnnnnnnnnnnnnnnnnnnnnnnnnnnnnnnnnnnnnnnnnnnnnnnnnnnnnnnnnnnnnnnnnnnnnnnnnnnnnnnnnnnnnnnnnnnnnnnnnnnnnnnnnnnnnnnnnnnnnnnnnnnnnnnnnnnnnnnnnnnnnnnnnnnnnnnnnnnnnnnnnnnnnnnnnnnnnnnnnnnnnnnnnnnnnnnnnnnnnnnnnnnnnnnnnnnnnnnnnnnnnnnnnnnnnnnnnnnnnnnnnnnnnnnnnnnnnnnnnnnnnnnnnnnnnnnnnnnnnnnnnnnnnnnnnnnnnnnnnnnnnnnnnnnnnnnnnnnnnnnnnnnnnnnnnnnnnnnnnnnnnnnnnnnnnnnnnnnnnnnnnnnnnnnnnnnnnnnnnnnnnnnnnnnnnnnnnnnnnnnnnnnnnnnnnnnnnnnnnnnnnnnnnnnnnnnnnnnnnnnnnnnnnnnnnnnnnnnnnnnnnnnnnnnnnnnnnnnnnnnnnnnnnnnnnnnnnnnnnnnnnnnnnnnnnnnnnnnnnnnnnnnnnnnnnnnnnnnnnnnnnnnnnnnnnnnnnnnnnnnnnnnnnnnnnnnnnnnnnnnnnnnnnnnnnnnnnnnnnnnnnnnnnnnnnnnnnnnnnnnnnnnnnnnnnnnnnnnnnnnnnnnnnnnnnnnnnnnnnnnnnnnnnnnnnnnnnnnnnnnnnnnnnnnnnnnnnnnnnnnnnnnnnnnnnnnnnnnnnnnnnnnnnnnnnnnnnnnnnnnnnnnnnnnnnnnnnnnnnnnnnnnnnnnnnnnnnnnnnnnnnnnnnnnnnnnnnnnnnnnnnnnnnnnnnnnnnnnnnnnnnnnnnnnnnnnnnnnnnnnnnnnnnnnnnnnnnnnnnnnnnnnnnnnnnnnnnnnnnnnnnnnnnnnnnnnnnnnnnnnnnnnnnnnnnnnnnnnnnnnnnnnnnnnnnnnnnnnnnnnnnnnnnnnnnnnnnnnnnnnnnnnnnnnnnnnnnnnnnnnnnnnnnnnnnnnnnnnnnnnnnnnnnnnnnnnnnnnnnnnnnnnnnnnnnnnnnnnnnnnnnnnnnnnnnnnnnnnnnnnnnnnnnnnnnnnnnnnnnnnnnnnnnnnnnnnnnnnnnnnnnnnnnnnnnnnnnnnnnnnnnnnnnnnnnnnnnnnnnnnnnnnnnnnnnnnnnnnnnnnnnnnnnnnnnnnnnnnnnnnnnnnnnnnnnnnnnnnnnnnnnnnnnnnnnnnnnnnnnnnnnnnnnnnnnnnnnnnnnnnnnnnnnnnnnnnnnnnnnnnnnnnnnnnnnnnnnnnnnnnnnnnnnnnnnnnnnnnnnnnnnnnnnnnnnnnnnnnnnnnnnnnnnnnnnnnnnnnnnnnnnnnnnnnnnnnnnnnnnnnnnnnnnnnnnnnnnnnnnnnnnnnnnnnnnnnnnnnnnnnnnnnnnnnnnnnnnnnnnnnnnnnnnnnnnnnnnnnnnnnnnnnnnnnnnnnnnnnnnnnnnnnnnnnnnnnnnnnnnnnnnnnnnnnnnnnnnnnnnnnnnnnnnnnnnnnnnnnnnnnnnnnnnnnnnnnnnnnnnnnnnnnnnnnnnnnnnnnnnnnnnnnnnnnnnnnnnnnnnnnnnnnnnnnnnnnnnnnnnnnnnnnnnnnnnnnnnnnnnnnnnnnnnnnnnnnnnnnnnnnnnnnnnnnnnnnnnnnnnnnnnnnnnnnnnnnnnnnnnnnnnnnnnnnnnnnnnnnnnnnnnnnnnnnnnnnnnnnnnnnnnnnnnnnnnnnnnnnnnnnnnnnnnnnnnnnnnnnnnnnnnnnnnnnnnnnnnnnnnnnnnnnnnnnnnnnnnnnnnnnnnnnnnnnnnnnnnnnnnnnnnnnnnnnnnnnnnnnnnnnnnnnnnnnnnnnnnnnnnnnnnnnnnnnnnnnnnnnnnnnnnnnnnnnnnnnnnnnnnnnnnnnnnnnnnnnnnnnnnnnnnnnnnnnnnnnnnnnnnnnnnnnnnnnnnnnnnnnnnnnnnnnnnnnnnnnnnnnnnnnnnnnnnnnnnnnnnnnnnnnnnnnnnnnnnnnnnnnnnnnnnnnnnnnnnnnnnnnnnnnnnnnnnnnnnnnnnnnnnnnnnnnnnnnnnnnnnnnnnnnnnnnnnnnnnnnnnnnnnnnnnnnnnnnnnnnnnnnnnnnnnnnnnnnnnnnnnnnnnnnnnnnnnnnnnnnnnnnnnnnnnnnnnnnnnnnnnnnnnnnnnnnnnnnnnnnnnnnnnnnnnnnnnnnnnnnnnnnnnnnnnnnnnnnnnnnnnnnnnnnnnnnnnnnnnnnnnnnnnnnnnnnnnnnnnnnnnnnnnnnnnnnnnnnnnnnnnnnnnnnnnnnnnnnnnnnnnnnnnnnnnnnnnnnnnnnnnnnnnnnnnnnnnnnnnnnnnnnnnnnnnnnnnnnnnnnnnnnnnnnnnnnnnnnnnnnnnnnnnnnnnnnnnnnnnnnnnnnnnnnnnnnnnnnnnnnnnnnnnnnnnnnnnnnnnnnnnnnnnnnnnnnnnnnnnnnnnnnnnnnnnnnnnnnnnnnnnnnnnnnnnnnnnnnnnnnnnnnnnnnnnnnnnnnnnnnnnnnnnnnnnnnnnnnnnnnnnnnnnnnnnnnnnnnnnnnnnnnnnnnnnnnnnnnnnnnnnnnnnnnnnnnnnnnnnnnnnnnnnnnnnnnnnnnnnnnnnnnnnnnnnnnnnnnnnnnnnnnnnnnnnnnnnnnnnnnnnnnnnnnnnnnnnnnnnnnnnnnnnnnnnnnnnnnnnnnnnnnnnnnnnnnnnnnnnnnnnnnnnnnnnnnnnnnnnnnnnnnnnnnnnnnnnnnnnnnnnnnnnnnnnnnnnnnnnnnnnnnnnnnnnnnnnnnnnnnnnnnnnnnnnnnnnnnnnnnnnnnnnnnnnnnnnnnnnnnnnnnnnnnnnnnnnnnnnnnnnnnnnnnnnnnnnnnnnnnnnnnnnnnnnnnnnnnnnnnnnnnnnnnnnnnnnnnnnnnnnnnnnnnnnnnnnnnnnnnnnnnnnnnnnnnnnnnnnnnnnnnnnnnnnnnnnnnnnnnnnnnnnnnnnnnnnnnnnnnnnnnnnnnnnnnnnnnnnnnnnnnnnnnnnnnnnnnnnnnnnnnnnnnnnnnnnnnnnnnnnnnnnnnnnnnnnnnnnnnnnnnnnnnnnnnnnnnnnnnnnnnnnnnnnnnnnnnnnnnnnnnnnnnnnnnnnnnnnnnnnnnnnnnnnnnnnnnnnnnnnnnnnnnnnnnnnnnnnnnnnnnnnnnnnnnnnnnnnnnnnnnnnnnnnnnnnnnnnnnnnnnnnnnnnnnnnnnnnnnnnnnnnnnnnnnnnnnnnnnnnnnnnnnnnnnnnnnnnnnnnnnnnnnnnnnnnnnnnnnnnnnnnnnnnnnnnnnnnnnnnnnnnnnnnnnnnnnnnnnnnnnnnnnnnnnnnnnnnnnnnnnnnnnnnnnnnnnnnnnnnnnnnnnnnnnnnnnnnnnnnnnnnnnnnnnnnnnnnnnnnnnnnnnnnnnnnnnnnnnnnnnnnnnnnnnnnnnnnnnnnnnnnnnnnnnnnnnnnnnnnnnnnnnnnnnnnnnnnnnnnnnnnnnnnnnnnnnnnnnnnnnnnnnnnnnnnnnnnnnnnnnnnnnnnnnnnnnnnnnnnnnnnnnnnnnnnnnnnnnnnnnnnnnnnnnnnnnnnnnnnnnnnnnnnnnnnnnnnnnnnnnnnnnnnnnnnnnnnnnnnnnnnnnnnnnnnnnnnnnnnnnnnnnnnnnnnnnnnnnnnnnnnnnnnnnnnnnnnnnnnnnnnnnnnnnnnnnnnnnnnnnnnnnnnnnnnnnnnnnnnnnnnnnnnnnnnnnnnnnnnnnnnnnnnnnnnnnnnnnnnnnnnnnnnnnnnnnnnnnnnnnnnnnnnnnnnnnnnnnnnnnnnnnnnnnnnnnnnnnnnnnnnnnnnnnnnnnnnnnnnnnnnnnnnnnnnnnnnnnnnnnnnnnnnnnnnnnnnnnnnnnnnnnnnnnnnnnnnnnnnnnnnnnnnnnnnnnnnnnnnnnnnnnnnnnnnnnnnnnnnnnnnnnnnnnnnnnnnnnnnnnnnnnnnnnnnnnnnnnnnnnnnnnnnnnnnnnnnnnnnnnnnnnnnnnnnnnnnnnnnnnnnnnnnnnnnnnnnnnnnnnnnnnnnnnnnnnnnnnnnnnnnnnnnnnnnnnnnnnnnnnnnnnnnnnnnnnnnnnnnnnnnnnnnnnnnnnnnnnnnnnnnnnnnnnnnnnnnnnnnnnnnnnnnnnnnnnnnnnnnnnnnnnnnnnnnnnnnnnnnnnnnnnnnnnnnnnnnnnnnnnnnnnnnnnnnnnnnnnnnnnnnnnnnnnnnnnnnnnnnnnnnnnnnnnnnnnnnnnnnnnnnnnnnnnnnnnnnnnnnnnnnnnnnnnnnnnnnnnnnnnnnnnnnnnnnnnnnnnnnnnnnnnnnnnnnnnnnnnnnnnnnnnnnnnnnnnnnnnnnnnnnnnnnnnnnnnnnnnnnnnnnnnnnnnnnnnnnnnnnnnnnnnnnnnnnnnnnnnnnnnnnnnnnnnnnnnnnnnnnnnnnnnnnnnnnnnnnnnnnnnnnnnnnnnnnnnnnnnnnnnnnnnnnnnnnnnnnnnnnnnnnnnnnnnnnnnnnnnnnnnnnnnnnnnnnnnnnnnnnnnnnnnnnnnnnnnnnnnnnnnnnnnnnnnnnnnnnnnnnnnnnnnnnnnnnnnnnnnnnnnnnnnnnnnnnnnnnnnnnnnnnnnnnnnnnnnnnnnnnnnnnnnnnnnnnnnnnnnnnnnnnnnnnnnnnnnnnnnnnnnnnnnnnnnnnnnnnnnnnnnnnnnnnnnnnnnnnnnnnnnnnnnnnnnnnnnnnnnnnnnnnnnnnnnnnnnnnnnnnnnnnnnnnnnnnnnnnnnnnnnnnnnnnnnnnnnnnnnnnnnnnnnnnnnnnnnnnnnnnnnnnnnnnnnnnnnnnnnnnnnnnnnnnnnnnnnnnnnnnnnnnnnnnnnnnnnnnnnnnnnnnnnnnnnnnnnnnnnnnnnnnnnnnnnnnnnnnnnnnnnnnnnnnnnnnnnnnnnnnnnnnnnnnnnnnnnnnnnnnnnnnnnnnnnnnnnnnnnnnnnnnnnnnnnnnnnnnnnnnnnnnnnnnnnnnnnnnnnnnnnnnnnnnnnnnnnnnnnnnnnnnnnnnnnnnnnnnnnnnnnnnnnnnnnnnnnnnnnnnnnnnnnnnnnnnnnnnnnnnnnnnnnnnnnnnnnnnnnnnnnnnnnnnnnnnnnnnnnnnnnnnnnnnnnnnnnnnnnnnnnnnnnnnnnnnnnnnnnnnnnnnnnnnnnnnnnnnnnnnnnnnnnnnnnnnnnnnnnnnnnnnnnnnnnnnnnnnnnnnnnnnnnnnnnnnnnnnnnnnnnnnnnnnnnnnnnnnnnnnnnnnnnnnnnnnnnnnnnnnnnnnnnnnnnnnnnnnnnnnnnnnnnnnnnnnnnnnnnnnnnnnnnnnnnnnnnnnnnnnnnnnnnnnnnnnnnnnnnnnnnnnnnnnnnnnnnnnnnnnnnnnnnnnnnnnnnnnnnnnnnnnnnnnnnnnnnnnnnnnnnnnnnnnnnnnnnnnnnnnnnnnnnnnnnnnnnnnnnnnnnnnnnnnnnnnnnnnnnnnnnnnnnnnnnnnnnnnnnnnnnnnnnnnnnnnnnnnnnnnnnnnnnnnnnnnnnnnnnnnnnnnnnnnnnnnnnnnnnnnnnnnnnnnnnnnnnnnnnnnnnnnnnnnnnnnnnnnnnnnnnnnnnnnnnnnnnnnnnnnnnnnnnnnnnnnnnnnnnnnnnnnnnnnnnnnnnnnnnnnnnnnnnnnnnnnnnnnnnnnnnnnnnnnnnnnnnnnnnnnnnnnnnnnnnnnnnnnnnnnnnnnnnnnnnnnnnnnnnnnnnnnnnnnnnnnnnnnnnnnnnnnnnnnnnnnnnnnnnnnnnnnnnnnnnnnnnnnnnnnnnnnnnnnnnnnnnnnnnnnnnnnnnnnnnnnnnnnnnnnnnnnnnnnnnnnnnnnnnnnnnnnnnnnnnnnnnnnnnnnnnnnnnnnnnnnnnnnnnnnnnnnnnnnnnnnnnnnnnnnnnnnnnnnnnnnnnnnnnnnnnnnnnnnnnnnnnnnnnnnnnnnnnnnnnnnnnnnnnnnnnnnnnnnnnnnnnnnnnnnnnnnnnnnnnnnnnnnnnnnnnnnnnnnnnnnnnnnnnnnnnnnnnnnnnnnnnnnnnnnnnnnnnnnnnnnnnnnnnnnnnnnnnnnnnnnnnnnnnnnnnnnnnnnnnnnnnnnnnnnnnnnnnnnnnnnnnnnnnnnnnnnnnnnnnnnnnnnnnnnnnnnnnnnnnnnnnnnnnnnnnnnnnnnnnnnnnnnnnnnnnnnnnnnnnnnnnnnnnnnnnnnnnnnnnnnnnnnnnnnnnnnnnnnnnnnnnnnnnnnnnnnnnnnnnnnnnnnnnnnnnnnnnnnnnnnnnnnnnnnnnnnnnnnnnnnnnnnnnnnnnnnnnnnnnnnnnnnnnnnnnnnnnnnnnnnnnnnnnnnnnnnnnnnnnnnnnnnnnnnnnnnnnnnnnnnnnnnnnnnnnnnnnnnnnnnnnnnnnnnnnnnnnnnnnnnnnnnnnnnnnnnnnnnnnnnnnnnnnnnnnnnnnnnnnnnnnnnnnnnnnnnnnnnnnnnnnnnnnnnnnnnnnnnnnnnnnnnnnnnnnnnnnnnnnnnnnnnnnnnnnnnnnnnnnnnnnnnnnnnnnnnnnnnnnnnnnnnnnnnnnnnnnnnnnnnnnnnnnnnnnnnnnnnnnnnnnnnnnnnnnnnnnnnnnnnnnnnnnnnnnnnnnnnnngatctgttatatattaaaaaaaaaaagctctctctccctcacatctttgtgtatgttattatccagcaactagaccttcaacatataccagtataatgttgttttggcttcccagcctccagaatcatgagtcaaataaaattctattctttattaattaccagtgtgtgatattctgttatagcagccaaaagagactaaagcagacagagtggataaattaatcttttaaacctcataatatgctgcttacaagagactcaattatgaattaagagcataggctaaaagtgaaaggatagaaaatgatattccatgcaaataataaccaaaggagtgaaatggtaatgcttaaattagacaaaatagactttctagcaatgtctctcacaagaatgaaatgagtttaccatacaataatagaggttaatttctcaagagaatatagctttatatatttatgcacccaaaagggaggcttctaaatataaaaagcaaatattgccagaactgtagggagaagtagaaagaaacccaataatagaaaactttaacgaaatgtataataaaggacatatagttaacagcattgtaaattggcaagggaaagctggtctcatgtgttgcgtttgagaatgcagcaaagaaagtgggaactgataattttactgcaagcctgagttaggatgaaaaacagggtggtcgattagaggttccacttgccatacattaaaaaaacacaggagaaaaccagtcctcctctggagtgttaaaataattaaagatcagaaaattagtctaaagtggctctagtgccctgtgttcataggtaaaaaacaaaaaacaaacaaaaaaaaatctaaaacctaactcaaatatatttcctataaaacactatcttagcctgaagcaaaatgcaggtttaacccatgacaaacatgcaattaacctctgaatatgtaaccaggacatttccatctggatagttcaaataaggctaccatataactggaaccaattcttgaatttgggttgctttctcatgcatcttatgaaagcctttcctttatgcccctctggtggaccagaaatcatggctgggtgctttccatttcaccaatcactctttgttcagataaactgatgaaccttttaacatagactcccgttaatttttaacacgagagactgtggaccccacgggccgcagctcctcccacgcaaacacccactcgcggtttttccctgatgacccatctggcctccctgaacaatttgggaaatactcatggctgtgggcgcagagcagggcgctgcccagggacaggaccggatgggccggacgggacgtgggggtcctcgctgctggcccagcggccatcttgcagccacaggggactgagggccaagctgcgggagactcggagctaaccgtggggaggccggtcctgccggtttcacagtctgttctcccctctcgggatggcgaaccccgtatactcaccatttcccagcttccaggatgtcctggcaccttaactatgcgtccccaaggacctacagatcgcagggcaacaggggctgtgacagagtagcccagggctctcaaggtgcaggaggcgaaagaggagacagatcccaagctcctgtgccagcaccagcgagagacacagatcccgccaaatgcaggaagccacgccctcctttcctctcctctgccaccgcgcgcctgattgggcggttcccacatcagtgtcaatgactggataaaactccaggacgcacccaccctcgcctgactcctgcccttacccccactccccctcagacttagtgcacttttgttagtttgtttttaagttctggaatacatgtgcagaacgtgcaggtttgttacatagttttacatgtgccatggtggtttgctgcacctatcaacctgccatctaggttttaagccccatatgcattaggtatttgtcctaattttctccctccccttgacctcaaccccttaacaggccttagtgtgtgatctttggctccaggtgtccatgtgttctcatttttcaactcccacatatgagtgagaacatatggtgtttgctttcctgttcccgtgttagtttgctgaggttaatggttcccagcttcatccacgtccctgcaaaggacatgaactcattctttttatggctgcatattatttcatggtgtatatgtgccacattttctttttccaatctatcaatgatgggcattagggttggttccaagtctttgctattgcaaacagtggtgcaatagacatatgagtgcatgtgtctttatgctagaatgatttatattcctttgggtatatacccagtaatgagattgctggatcaaatggtatttctggttctagatccttgaggaatcaccacactgtcttccataatggttgaactaatttacactccctccagcagtgtaaaagtgtttctattcctccacagcctcaccagcatctgttgtttcctaactttttaataactgccattcaacatggtgtgagaaggtatcccattgtggttttgatttgcatttctctagtctccagtgatgatgagcttttctcttttttgtgtttgttgaccacataaaggtccccttcttcttcttcttcttcttcttcttcttcttcttcttcttcttcttcttcttcttcttcttcttttcttcttcttcttcttcttcttcttcttcttctccttctccttcttctttttctatttattttacttattattattatttttaagatggagtcttgctctgtcacccaggctggagtgcagtggaaggatctcggctcactgcaacatctgccacccaggttcaagtgattctcctgccttagcctccccagaagctgggattacaggtcacccgccaacacatcctactaattttttgtgtttttagtagaaatgcggtgtcgccatgcggcccaggctggtcttgaacacctgacctcatgatccacctgcctccacggctgaaagtgctgggattacagacttgatcaaccgcgcccagccaaatatcttcttttgaaaagagtctgtttatattctgtgcccactttttgatggtttttttttgtgtgtgtgtgaatttgtttaagttctttgtagattctggatattagacctctgacacatggatagagtgcaaaaattttctttcactctgtaggttgcctggtcactctggtgatagcttcttttgctgtgcagaagctcgttagtttagttagatctcatttgtcaattttagcttttgttgtgattgcttttggtattttattcatgaagtctttgctcatgcctatgtcctgaatggtattgcctaggttttcttctagggtttttatggtttggtgttttacatttaagactttaatccatcttaagataatgtttgcataaggtgtaaggaaggggtacaatttctgttttctgaatgtggctagccagttctttcagcaccatttggtaagtaggaaatctttccccattgcttgtttttgtcaggtttgtcggagatcagatggttgtagatgtgtgatgttatttctgaggcctctgttctgttccatttgtctatatatctgttttggtatcagtactgtgctgttttggttactgtagccttgtagtatagtttgaagtcgggtagcaggatgcctcaagctttgttgtttttgcttaggattgttttgggttgacaggcaaacaggctcctatatttggggtcacgtgcccagagtatcacagctaattcagacgtgagctgagacttgaaatgcacgtgctctttcccttacctgggtctgttgtataatgcatcttagcagctatgtaacagtacgaattagaatatttagacatctttttagcaactttttaacctgcatttttgtaacgcggtaaagaccttcatcccatccctgagcccctctctcacaacactgcaccccactgctgaccacactgttgtgtgaccattaggaatcaggggggcagcgggggctggaaataaataagaaaggattatgtttcccaaatttgctcaccttagaaagtctcctcaaccattctgtgtgaggtgatttttccaaggtaattgtgccctgactgcgctggatgtcagtgtgtcttgtctttttgaaaatcactggattactctcatgaacggggtatttctctttctatttgaaaatggtcaactgtcctctgcaggtgtcctgacttgctagtttagaccctgaaggtagcggtgagaaaatatttgggccacatcagaatacctattctcagctggaggatatatagaaatttcttaataatatctaaccattttctcaataaccattatatttaacattgatagcttggagggcagggaaggacacagatgacacaatcttcaaagtttaatttagttataaggttttttttttgttcttgcttagttttgcttagtttttggatacaaggtcttgctctggtgcccaggctggagggcagtggcataatgataactcataatttggttgtaacggttctttaaaatatatttttgctgagagtgctagctcatacctgtaatctaaacactttgggtggccaaggtgggatgatcgcttgatcccaggagttcaagacgagtctgagcaacataagtaggctcagtctctagaaaaatatttaaaaattgtctgggtgtagctttgcatgcctgtagtcccagctacttgagaggctgatttgaaagcatcactggagcctaagaatttgaagatgcagtgacccatgattcagccactgcattgacagagtgagatatgtgtgtgtctgtctgtgtgtgtgtataaagaatttgtatgtgaaaaaaattcaagcacaggagaaaagtgaaagcccatggtgggggatgtggagaaaggtcactgtggctccagcaactcagtgagacttggttttccatcttgaagaattgcccatccacactgacaccatagcctaacatatgccagttctcacactacacctgctgggataccagtatgtagccttttgaaaaaaataaaatctttcacctaagagaaggacaagagaaaacgagggtttcacatctaaagccttcattttctttatgaatcaacagccacttgtcatttcaattgtccagaggcgactgacagcactaatacacttaatgaatcaaccaggaaaaatgggcctctcaggtgaggaggaggcacaatcgtcacaaaacccaatccgttctcagctttgcatggtgctcgcatctcaagaagtggtgttagccatgtgaaccgtgttcactggacaaggccagaggaaagaatatgtagtacaacacaactatggggctgcaaatcaaactggtagtgagagcatgcatgaggcttcagtggccgagacactggtggctacccttcggtgtcacttaaatctttgaggtgaaggacatctttttcccaactggctcagagaaactaatcaacattaaaattgagatttgtttttcttttcaaaatttctaagacatagaggactctctaacactccaaaagacattcagctatacatgcagctgaggacctgcctgctctgtagagggatggcagagcagcagccaccagctttagtagctttaagctcctcttctcataggaacaggccacccccacacaacccccctaacttcataggctctggctgtcaggtgcacctgggggactgtcttcctcccatctcattagctctcgaagacagttcagctcaatgtaaaacctaccttaggatggtgagttgtaggctctcctctattctcccagcgcagtgtgacttctggagagtgcttctccatcctcttacctcagatgatgtgaaaagagccggttcccgggcagttagatgttcagtgacataacaggcccagcatgcgcagggcctggccccacaacctggcacctctcccttacctggccttcaggctggacttttctcttctgccacaaatgtcaggtgatgatcacctctgccacactctcatgagcttggtaagtatcaggggtgtaaaccccaacagatttcctgtgactctaccctcttaccacccactcaagtgacattataagcataattttacatttgatattatttatgcgtaattttttttataacatttctgacaacagcccacacaacgaaatgagtctgggttacagaacacacgggcgaggctggggtagcaggcttcaattactttattccaatgtgaaatgaagattgatgatttaaaaacaagacaaagttgtttatcagctgtggggtggctacacttgctagctcatgctcactttctttgaaacaaggtatctgtacagaccatactcataagtagctcttcacaaaaccccagacagaagtcccagtcagacacagctccctcaggctcacagggcagcaacctcctcctccatgttaggctctgacagcaggcaagggaagaagcacaggcagcaggggacagggagatgtcccggactgtagggatccccaaatgccccagagctattatctgtagaagggtgcacgcaggtctcactctgacagtgcagtggctgaatcatgggtcactgcagcctcaaactcttagcctccagtgatgctttcacctcagcctctcaagtagctgtatggcaaaaagcctcctatttttttacttaaaacctggacttcaagccaggttggacctggggatagtggcagcaaaagcagcagccaaatgtatacactccagatgtctacactcatgggcacaggcatattccactcttgctggagcacgagaggcctgagaggcacctgtttcccagttgctaactgatgcccacacaccccattcacgtgtcttcatttaggtctctgcatcgtgtattccctcagccagtgcaaacacatcttctggggggcatcattaattgcagcacctgcccctcttgttctgggagggagtcaagaggaatctggtcagctcctaatcccccaggacaaaggtgctgcccccttttcagcactcacatccagcaatgccatctctggatgggtttttcaaacacaagtagcatgaggtagcaagcatggtgtgacaggctcagggccatgggcagccggttgctggagaagcagcacagggcaggcacatctgtgggtggcaccatgacaagccaaggcagccacagcccctaatcccaacagctccagcccagttggcattcaaatcttcccagatagtattggggtacgcgatgcccatcactcgcccgctcattagcacggccttgttggttactcagagactaaggagagagagtgggggatgtagatccagggtgggcaccgccttgcagccagagtccacctgactgcaggccagcaagcaagcccaagcagctcagctctagtcacctctggctgtactttatgtgtatactttacacaaaggtagcaaacagaggtcaacattagctgttgtgacatgaaagtctatgcctcattaagaccttaaaatgctgttgtcttaagctctctttattccactaaaatttatacaaataaacacatgcaagctgaaactactataaaggaaatattaggattttttaaacccataaacagacatgaaaacagtcactgtttgattgcagagaaagtgagcttctaaagcagctgaccacaaaacagcctcaccaaaccccaggcaggccaggcagtctgaacactacaaggccacgtgatggtcacagaggatgacagctcccgtgagtattgcaaggcactgtgttagcttctcactcacagtctcagaataccctgtgaggggaggccccgtctcactagagcacaggaggttcctgagctcttcccagaaaatggtcatcaaacgatggagcagagggaagcccagacagaacaagtgagtccctagggtctccttaacctccctcagctcctccacatgggtccctgagggaaagtgagcagcctcctaacccccttgatagggttccagtcctgcaggtcggactctctcattttatgctaccatagggggtgacaatgcaaccccaggccccttatttgccatccctcaatgccaggccaggcccagagccctttgctaacacagcccaggggatgctcaaggcccacctcggcacagtcacctgtagtgtactgagatgagcaaggaggtgcaagtagacacaaatccccatgggcttggcctcagccatgttccacaggctcagggcctcgcagatgagctcacagccctccttcaggaagcctgcagatcacaccctcagggagcagtgctcagatgagcaggcaggccccacatcccccaccccatgacgctctgttccactttgcaggcttctgcattggccagtccccactgctttctggtgagatgtccgagttgaagtgaatgttgaaggccacacagctgatggagctcactgccttgcacatgttgtaaatcacctcctggcttcaagggtcagctgtggagacacagcttgatgggaggtaggcccactccaccatcagtggtgctgggttgccctgatctgcaccttccagatacttgctaagatatctgcatgcttctctaagggactgggtcacgagacacccctggcaaggaccagctggcagaacaggctggacactctccctcagcctccccagcagccccacctgtgctgtcatctgtgctgatgatctccgtggtaagattatgggaaacttttacagcaagttttcctttctcacttccctatcttaataacagcactgataacttttaagccctagcaagctgaaactgcaagacacatgatcttctgccttagaagggccatgtttgggcagtgggtgcccaggtgagagccccatggttgttagtggcagccgggagctggatgggcctgccccatagcctagtgaaaagtgggaccctctccttccagagcatggaagtctcagaggctggaaaaaggtgcctaagtggcctgccaaaaagcataaggctagaaggcctggaaagagccccaacagccttcaagctgcctgagagggctgggctcattccagctttctttgctttcatcctgttagcaagaaaacctgctcacagatggcaggcgggcctgaggctgccattccctcatcaggggctataggcacctttaatgtggctctttcttgaagcagctgctcaggccggttctcgaagagcagttccctcattatccacaggtccttcttccagccccgtgtctgcagagggactagggagggagacaagggctcagcctgtgccccacaacctgctttgagacatctcttttgttacttcctcacagacagcctgaaacttccaaatgaacagaccagaatggagcctccaggaaagtgtacagaattctgtctagtacccagaaggaagggggttcccagtgaaggcagggccaggctgcatgcacctcttcaaaaatgttctcctcatagtccacgctcaaggtgtacatcctctgtgtgcttgcagtccatggcagcctctgccttgggaacagtccagctgcacacctgcaatatggtggtgaccctcttgaatggatggttctgggccccattgcagacagcagatagggagatgctcagcccatcaagcccagagccctgccacaggcttctgtgaggcctccacctgctctgggttcttgccctgagaggctgccctgaagtcaaacagaagcaggtgggactctcttccacagctgctctctctcccactgacagctccctagagggtaactcagacagagaagatagaattctcaggcagaaggacaggagtttcggctgccgattcattccatacccccacatgacatgacacaaggcaggggctgtgggacaaaggcattgcctttccttctggcaagaggaatgccttaggaagcaggtctggtggggctagggttgagcgataggcttcaggccacaaggagtggatggacactgagcaagtatcctggttatctgtccacagatccagaacaagtggcatcccaggagcctgggaggggctggcagagacttactgtgtccagcaaaagccccatgtggatgcggtaatgctgcctgctggtccttgtctgtaattacaaacaggtacatgaggtccccatggatcttgcagctctcagggagtgggttccagctgctcatgttaggcacttttagtcactgaacgtgcttcaggaatggccaagtttgattaagccaggcgtcttgctgtgagaccctccacccaactgaggaccctcttccttgtcccccctgacagtttaccttccagttctggttctggagacacgatggcccttcttgggcccctgggagaatgtgctcagatgacacacagtcgacagggcccatttccaagccattcttccatttcccactgtttgaggggccgaggccggtgatcagcacagggccacccagggccagctgtctgcacctaaacgtcatgttggtctggatgtctcagggccagaactctccaggtaagatggcctggtcctcagcacctggcctccatgctcctttttcctctgttcaatcctggccccaatgcctcccgcaactctcaggtcaccattggagaagatgctcaggaagaacaaggagctgcagtcaaccctgctgaaggtggcatatgggtccaggctcttgagctggtcttcgacatggtacatgtggatgcaggctttgagcagtgtgagtagctctttccggaaggaggggaaaacggtgttaccagggtcctacaccctagaacgacccatctagcacagaaaacagtttgcaacgtgctattatgtgtgattttaattttgggctttaggctttcatttccaaattccacaataaacacataaggtggggttctgatttcaacacacacacacacacacacacacacacacacacacacacacacattctctctctcttcctctctcttagaatcttccagtgaattcacactgaaagccgaagtcctcccagaatcttgtgagaacctaaatgatctgaatagtttgtcattgcttttagggatctgggaaaatctctgcacatttctggagaccgctgttatgccatttttaataaatctgttgtgcttcaattcagaagtgtgtgaggggagttgtggaggaattggcatttgggttagaaattccaggaacaacagagacagatgacacctgttttctgcttcataatgtcaagttttatgaaggctaaaacctaattctacaaaaaaaattagactgaaaaactttataggcaaaaattatcttattaaataggaaaatctaattattttattttaaaattttcttttccttagtaggacctaatcatagaaatttaaacactgtatgccaacagcctctactgtaggatggtttattgtaagtactcattttacagatttcttacaaaaactttttccgtaagagaaattagaatattgttcaacatatattgaattcacaattattaccttatttctcacttattattttatgattctgttttctttaatatgaagattactatgactgtgttttcactttctgaattatcatgtgtcacatttttctgtaatttcagtttgagaagttgtaaaacagcatgctcaaatgtatatgttatgtatcaattatataattaattattaaaatatttggcttgtatgtttaattgactctaggcacaatattactattagcattttcttccagttttcccaacttttatttgactaatagtacaatttatttccagtttttattttatctgtcaatgttttatactgtatttacaatatttatattgttaccatatgtaaaaatgtaagacctttctattaaaggctagattacagccttacccttttgtgtaaggaaagaagcaatgcatcagtagcataatttaaaactttctctagtattacttaaatttttattccttaaaactttctcatcacatctctttttaataattataatatggtttctttgaaatgttgttgccctaattgtatccaagtaattcaaaatttatactttttatggattcaaaggaagagttgaaaattgtagttacctaggattctttttcagttggacactatgtttattcaggattttatagatcaaagtttctcttaattatgttttagaatttatgtttctgtattttttagagtaggctgtctcacagcagttaattgtgtttttactttctacctatttattatgattttgaattacattattcaagtaagaattcggggaaggtttcttttaagtttgttttgcaattttgcatttctgtgtttcatgttttagggtagggcaccttacatcagtttattgtttttagtttgaatttatataatataattttctatgacaatattcaaatctgtacagcttaagacagtgtgaggcaaaaaatatgaagcatccctatggtcttttgttaatataatgatttaattgtttgtttgcttgtataaatattgcccctattttgtttatgacttgtgtattttcttcttgtttgatggacaataattgattctgtctaagtgagtaatcatggaaattgtcttaatttcaacatctattgtttatattatcctagtgtgaaagaaagacttatgcgatttgaagataatttttcaaaaactttgtaactctctctcttcaggtgtctttacttatttattttttgacagactctcaccctgtcgccaaagtgcagtggcacaatcttggctcactgcaacctccacctcccaggttaaagcaattctccagctgctgcctcttgagtagctggcattaaaagtgtgcactaccacgcctggttaatttttgtgtttttcatagagctggggtttcaccatgttggccaggctggtcttgaactcatggcctcaagtaatctgcatgcctcagcctcccagagtgctgagattacaggcatgagccatctctcttggcccttgggtgtcatttttaatttcgattgtggtaaaaatacataacataaaatttagaatctttaatattttttcttatacagttcagtcatgttaatgtatttacattgctttgcaacatatttgtaaaacttttttcttttgcaaaactgaaactcaggacacatgaaatgacaactacccattttccttacaacctggctcctgataaaaatcattctattttctgtttctaagtttcaatactttagatattacatataagtagaatcatagagtatctgttttattgtgactaattttacttagcatcatgttctcaagatttctctttattgtggatggtacaagattttctgcctttaaaagctgagtaatattccattacttttgtattacaaattatatttatttattcattctatgaggaaagtttgtgttgctttcacctattggcctttgtgaataatgctgcaatgaatattggtatgcaaatagctatttgctcatatgtatgaggtttacatgtgtgctaccttctgttttattggaaaaattgtctgtctttatgctagaaacaaactgttttcattgctgttgctttgtaatgtgctttgaaatcagaaaattgaggccgctaacattgtttttttttaaaacatttttgggctctttatggtcgcttgacattccatataatttgttggttcctttttctatttcaaaaacattgctaatttaaaagggattgcattgaatctgtaactcgctttaggcatcatgagcattcttcataatatcaagtcttacaacccttaaacatgagcatgctcaaaagtgagttgtttaatttccatatatatgttgctatttttgttttcttctgttattcatttctagttttattccattttgatcagaaataatagtcactgaaaggctaaaccactctgggaagtgacccccattatagaacattacaaagagatgtgagggcaccacttctgccctgatgggctagagggatgtgttctctgagatgacacgttgcagacaaatgcagggaacaatataacccccttttcatgtaaactcttccttatttttctagagtattagtgatagtggtggctttgaagtcttggggaaggtctggcagtgccgtgaacctgcctgctacaggtgataccaggggggaaaaattaaaaccatacaaactgtagaaacatgaataaatacagcctagtgtaaagtaaaaacaacacaaaggccttctctgatatttctacaagaatgtaaaaagggactttacacttaaccaagctgcctttgggactagttaaggctagatttttgggaggcacatctttgggtcactcatggaaatcccctaagagagagcccagagaaattccatatttgggtctggatcctgggcccatcctggttttgtcagacccctgtctgtagagacccccatgtgcctgctctcaccgtaactcactgtatgccatgcttgggggtgtggtgaacctgccagttgtccaaggagatgggggacttgaacccatcaaatatctgctcaatgattttaatgaaactctacagagagtgttcccagcagtgaagcaggaaaaaaaaaaaaagaaaaaagaaaaaaaattaattatctcctttgtttttaccaccaggtgacatctccattagaaattctgtttcctagatcaggaacataggagtatctgcatagacccccagccaatgaggaaacccgaggacagcttaaggccttgggattcacatctgagtagacacacttggtccacaatgctcaactttttattccaccagccatgacctgggtatgaacatgacatagccgccagggttccaatgccttacagcctgcccctgtgagaaagagccccctcctttcctgctccccctgcaacacatggtaatggtagacagggtcgggttgcccagattagatgacacgggtggcctggcatggacggacctgacctgggcttcactgtgttacctctgtttgcctcttgttgaatggccagtggtatcaaggatgtgggctgagccaatatgtatatggtcagaaaagtctctcactttgaacctttctcaggcaacagcttaggaatatagcacacaatgagaacacagtactctctcaagcatctcccatgaaattagctagatagagggctctctctagaatgtgggtttctgtttcccaaagttctaaattctgttaggttctgtcacaagggaagtctgttaacttcttcaaggttttatcccctgagcccttttcctccataaatctatgcaaagtccctactgggctgctgattgctcaccctcatctcccatgtcaactcttttcctgtaaacagttatgcaaacacaattatgcctcttactccccaaaaagatctaaatacagccagggccccaggtttgagagaacagagttggattaaaatcttcttttccttttcatttctgtgaccatatgaaaatgactgtgtgcttcagttctccccagccctgaagtatgcataatgggattaggctagcatcaacttccagaaagagtcattggcgatatatgagatagaatgaatcaaaatcagttggatgtagttgctcttgcctgtaatcttagcagattggtagaccaagatgggtggaacacttaaggccaggggtttgaaaccagccatggccagcatggcaaaaacccttctccactaaaaatgcaaaaattagccagatgtgttgatgcttgcctgtaatcccagccactcaggaggctgaggtgtaagaatcacctgagccaaggaagcagagattacattgagccttgatcatgcctctgcactccagcctgggtgacatagcgagactgtgtctcaaaaaaatatatatactatgtatatataatttatatttatatattatatataatatataaacttatacatatacacctttatgtataaaagatatatatttcatatatctgtatacataaaagatatatattttatatatatggccttatttttccattctacagcagaagaggttgaaatcaaaagaaaatcagatactgtattctggcattaaatattccagtgctgtgcattatatttggaatcacatgtatatgcttcatctcagcctatgtggtgggcacccccaacaaagtctcacaacaacactaagttgtgagtgactctgttatttaaaaacgcagctcaccgctcagtgcctcagaagccggtactataacaccgggtttccaacaaagacattggattccagctgaagcctctttccctgtgcttacttaaaggtagtaatattctcagaaaggtttaagaggtggcttcttgtttagcagggaattgctgaaaggaaaaatgtatggaaagtcactgggcatgaacagccatcttttcctgctacacacaggtcatgtgcaaatttggggacagttagtacaaaacatgtgatggaaatttgggctcttacatcagtgagcttatttcacacagactccagttgaccatattggttccaaccaattttagccactttttagaagtctcataagtggaataaatttcattctttcaacaagttctatcttttcttatctgtcattctgcaaactgaagaatttctgctagtcgttggttgaactctttggggacctggttctagtttctgtcaaagagaatacaacaaatgtgataggttatcacttctgacttagttcaggcttctataccaaaaaacatagactaggcaacttataaacaaaagactttagttctggaggctagaaatttgagattggcttccagcatggttgtggtctggtaaggactctcttctgagtttcgaactccagacttcaggttgtattctcatttagcagagagaaggacagacagccttctgcggtttcttttacaaagccagtaatctctaccacgagggcctcatgcttaggacttaattacctctgacctgctaaggccattaaactggggattaatgttctggaatgtgaatatggtggggaatcacatagtctactgcaacttccaaagttatatttccaaaacagctattattttcctcccacttgctctgtcctgtgtttcgtctctcaatctctctgtctccctttctctttttctgtgcatatgtctgtctatctctttcattttccatctctctattgtattcttcaagatgaggaagcgatctccagtgtcctaagatgctctaggcacagacccacatgatagagaactgaggaactgcccaggccaatcaacaggaagaaactggtgttctcagttcacactgaatcctgccaatttccatgaggcagattggaggctgatctctccccaaatccagcttcagttgaaatcacagccccagcctcataggggaccttgaggcagaggcacccaactaagctatatcgagattctgattcacaaaaattgtgagatagtatttgttgtcaaaatgtgctaaaattcagggcaatgttgtcagagagcggcaaatgactaatctcctctttcaggccccaggatacaccctcccctcttttcctttctttctcaggctgcctacagccacacttgtccctttataacctcctctgctaaactgacttgtgcctctgagtcttttcacaaagagtggcttttccctgacacactttccacacctgcgcagttgtcattctcgtcacaacataatgtcacctcagggaggcattcatgtctcctccaggcaacctctccccagccctccctcccaacattctactttatttccattataaaatgctcttttctttcgcatgtacttgctttagtgtttttgtcctgccgtcctcagactgtaggctccccgcggggatgcagggataacataatcgtttttggtaccacatggtgaacctaccaaggtagctgccacagggtgagtgctaggggaagagtcgctgagtaaaataacatggaaaatcacaaagtccttcctgctttcggtcacccaataatgtggagatcaagaatgataacaggagctgcaggccctcagcctgtctctcccacggctccagctactccagtcaagtccagcgggcacaagaaacacggggtctgcagccacctagagacctccgctagcactgtagtcccaggcagaagcatcacaaaacaggtacctgcactggggaattctcaaggcagtggctcttcagggacccctgggaaaaggagcagtatctgaaggctccaagggccataaaagtgacctcggaagcctcccttgattcctattttcctcagcctctttgagtgtgctgtgcactcattaaacattttaacagcattcggcgacattattttcttccacttccgaatgaggacctcaaggacagcccaaaaaactagtattttttctgggccccacactccagagcccagtgcattgtcacattgtgctttattccaagtcctcatccgcccaagtctctaggcctctctcttctctgaaggacctctagaaactgaaaagcctcttcccagagtctcaaagcacagtgatttaccaatgaaaagccaagggcggcagacacctatgagtatctagaatccttggtattattccttctcagtacccctatttatgagggagaaaacaaaggctttctttcccgtagcctgtctttatatcacacggggtggtgggtggagggcatagctcattttagttccaggtgcccacagaagtgggagtcacaaccccagtcctgtcctcttgaaacagctgggaaagtccccaggcttggaagaacccagggaacctggaggatccttcatcgcatgctgtcagctcctggtcatgtagctgggggagtggatgcctctgcctcatggcaaagctgcatctactgtttcttccccttttgtcacttctttggtttcctcttccctaacctcactttagaatctccactttagatctccaatttagaagcctgtgtgtgtgtgtgtgtgtgtgtgatgtgtttgtgtgtgcatgcctgcacgcctatgtgacaacattgaagagtagaaagcccaggtagaaagtagagcacagggttttccaggactcatgggctctcatttccaaagcaaacctgatgggtggggtgcatgcaaggcctaggaagctggatccctccctaatactctgtgctttgcccaatttgtgggatctggaccagtctttgcctttttgggaggtctcagtcttcctgttgtaaaataaagagttggctacaaaactgtatgagcacatgctcagtgaagacagggtgtcatgctcaataccacagagaatattgggatggggaaagtttgggcagacttaggtgtccatgcgtgctcaggcctctgaacagggccagtgcaggcaaacataaagcacagcacagccaggttttctttccagggctacaggatgaaacagtgcaccacaggatctgctcttgaggtcggtcccgcaagattttcccaccttcaaccagcaactgtttgatgaatttcatgtcctgtgaagcccatatccacccccattacagtgaggggcacagggcactagacctgtaaaataatgtcttttgcctttttttcttttcttttctttttcttttttttttttttaactgagtggatgtttcttctttctctttatctgttttgtttgttttttaactaatttttaagaggtctttacaggtcagctgtggtgcctcgcacctgtaatttcaacactttgggaggatgaggcaggtggattatttgaggtcaggagttcaaaaccagcctggcgaacctggtgaaaatccgtctctactaaacttacaaaaaaattagcggggaatggtggcccaagcctgtagccccagctactcaggaggctgagacagaagaattgctgaaacttgggaggcggaggttgcagtgagccgagattgcacgactgcactccagactgggtgacagagtgagtctctgtaaaaaaaaaaaaaaaaagagagagagagagggagagagagagtgctcttcatggaaacatgagcccctttgtaatttcatgtgttgaaaatatttattccaattttgcaatttcttttcttattgtggtgttctctttaagtttggtttagatgttattagtgtttctccccaaattgatttattgatttccattttcacaatacaatattttggcagaaatcttgtggaaactgtctaatcagtttaaaaatttaaatacatattaaaaaatcaaagaactgtaaaaactgtcctgaagaatgacaaagtttgtgagcttacaatgccatatattcagacttagattaaagctatagtaataaaagctatctatggtagtaatgcaaaaataggcacaaagaaaactagaaaaactcgagagtccaactcagactcacacatttagacattttgtatattacaaaacaggcacagaagagcagtggagagaagacagcatctcggtaattagccttgggtcatctggttatttatgtgagaaagaaataaacctatcttatattgttaacaaatttcgagacaagtggattttaaattttaaggtgaaaattgaaaacaatatttctagtagataacatagataagtatgtccatgactttggcacaggccaagatttcttgggacacaaaatgcataaattatcaagacaaaaatatgacaaattggactttattagaattaaaaccttctcttcataaaaaaaaaagcttcaggagagctgaaaggcaagaacaaagtggaaatcaacatttgtcatatattgatctggcaaaagctttttatctagattattaagctaaatcccatcacttaataaacaaagatgcatacattgaacaaaattggcaaagatatgactaggagttccacatacagaaccgaagggccaacaagtagatgaacatatccacattcttatgcatcagaacaatgcatatgaaaactacaattgaataccactatgcaatcattaacatttttgaaaactgacaaaattaagtattagtgatgatgtcaagcaactggaactttcttataccattctgtgtgcaaactgttataaccacattcaaaaccacttgagtagtaactccttacatacacgatgtacataagcacactctagaacccagcaactctgctactaggtatatacacccaatagaattgccagcatattttccaatgtagtaaagtgctcgaagtagcattatttggtacttttccaaactgaaaaaaactcaaatgtgcatcaataataaaataaataactaaaacagctacatattcctttataaggggacattatacagatataaaattaattggagacatattaaaatatacaaaaatctaacaaatacaatttaattagatttaaaagtcctatccagagcaatcggccaataaaaaagaaaaaggcatacaaatagaaaaagaaattgaattctctttctccatttgcaatatgagtcactacgtagagaatgctaaagcctctccaaaactacttttggggaaaacttgaaaagcctcctgaaacggataagcaagtaaagttttaggacacaaaaccaatgtacaaaaataagcagcatttctatgcatcaacaactttgaattcctgaacatcttctggttttattgcattttcaattttttccctccattaactatacattttttcttttttcagctaaactaatttattcttctgtataatttcaccttgttaataaaccccaggccaaaaagtgggaataaagtatttgtctgcatcctgtttcctcattttgaaaactagtctagacgaaacctatacttgttctagggagttggcatagacagcatttatttccgttctcagcagtgatgccagccagaaagagggagttccccattttcactttggttagacaggactctggatggttgaaggggaaaagtttcagactctaagggagccaaataggatattacaaagatttatgcatttactccgggagcaattattgtgttaaattttgtgcaaaacactgcgcaaacagcaattaaagtgaaaattattaaggcattacctttaccttgggaaactcacactagtcagattctccgaaccccagaacataacaacaacctagtaaaatcttgttcagagtgaagagagggtgggagcaggaaggtaaggttaaaaattaggctgggtgaatgagataattacccctagtcaagcagtggaagtatggatggctttgggatgggtgaagacaaaagaatctcagcagagggtgcagataaaaaaaggcagaaacacaggaggcttatgcaggaagaggaatgagtttgctggactggggagagtgacagtaaaaagcagaggataataggcatctctggtcatctagggactatagggtggattagttgggggttacagaatcagtgaggtactttttaacagtaggatgggtaaataagagctataatttggaataattatgtagcaatggtggttaggagcaatagaaactcaaagtattacataaatatgtttttttcttattctcccacacaagcctttcaccttccctcttaaactgagaacggagtggtttgctatgatgtttttaaattctcacaggcaagcattactctgtgctgccttttaataaaggctaattttaaccaaattaaagaagattgaatggattttcttgatcataatggttgagtacaacatctcttaccttctactagttttcagtataactgaagtaacagaatgtcaatactccatggaggggtgttcctcttgctaaggctccctcctctgggctaggccttctacaccatggctgtcctgctgtggctggagctggaatttggattgacctctgtgtgtcttcctagcacacaataggtgtccaattagcatgggcagaatcaagctcctccctctcaccatttatttctccatttgtcccttgttgggaatggagagtcctgccactgagttcagcccagggttgaagttcaaatctcagctgatacttggtggatgttgacttttttgagaagaacttgggagaataaaacattataaaggcgctggccaggcacggtgtctcatgcctgtattcctggcatattgattggctgaggagatagaattgcttgaggccaggaatttgataccagccttgtcaacatagtgagaccccatttatacaaaaaacttgaagcattaaaaacatttagcctggtgtgatagttccaaactgttgtctcagctatgctggacattgaggcagaggatcacttgagccaggagttctaggctacagggagctatgatcgtgctgctgcactccaaccagggcaactatgcaagatgtttcaaaaataaaatcttttattattcttcacccctatagtctctccagaacttgtgcactatgtagcagaaagaatcaaactccccaagagtttggttcttgcttatgatttggttttctgctgcttggctgccccctcatttccccattttgtataaataagaacccccaggtgaagtggagtttctccccagcagagggtctcaccaaggccccaggactggcactttaggtggaggcttgcctttcaacctctgaataataattgatactaaaattgagaagttttccagacaccagcttcctgaaaggagcacccagtcgagacaagatgaggtcagtagcgaaggtgacccaggctgagtgggccgtacattcctctacttttcccaaacttccctctgacatcctacaaactttctgtcttcccaggactttcttgccagggagtctaatgaagtaaaagctttaaaattgctttgattttaaaaataattttattggttcttaaaatgtactgttaaatattactgtttttcttcccccaggggctacgtgaacataagctcggttttcacactagcagcatttagaaatgtctcttctggaggaacactgatgctctcaatcacacgtggtaattctctcctccaggcacaaaatgcagtctcagcatctctgtatcaggagtcactgtctaagtctctccagagaaataagctacccaggccatccagctgctggtgagttgctttgtggtcatgaactgggtagatttcctcatctcatgctcattggccacattcaggattaatgattcaatgcttttgttgttccagaagctgtggtcagtggctatgcaggagtcagtctttcagtgctgatctttgctgagaaaataatagtattgttcaaacagtatataggatttgcactcaatatttaataatttagtgacaaaaatctcttaaatatacattatactgatataaaataagttactcatctattatcaaatttactcttttatttaatataactcttgggataacattttcttttatgcttccataaatatgcttcacatggatatatcacatattgtgtataatttcacacagtgttaatatagtttccatctatttagatgtttgcacatttattttatctcaatgtttgttctcaggaagagtgtttttctttataaactaaattttcagcaaattttaaatgcatttcactgacgtaattatacttacattgtatttgtgtattaagttacattttgtccttaaacctgaaaataacttttcaaatatatgtaattttaaatttacatgtttttccctcagaactttgaaaaccataacctattggattcttgatcttattcacatattgagaaatatgtttcttttcattgctttataattaatttgaattttatcttagatagctttacgtgattttctctattatggtattatgcttttaactattgtttttcttttgatcagaatgcctttaagctattataattaattattttaataattatatatttttattccctatttgacattcactccattttatttattcgaacttgcacttaaacaacatgacttattttagatttttatgtattttaatttttcatattgtttatttgttttatccctattgggacttctaaatattcacttcatcatatcttctaattcataatttctttttcaattatgtaatttttctatgcattctatcctttaaatttaaaatttttacctaattattttgataatataacttattttgatcttacttttaaacttttcctctaatatatttaaacattataactacttatattatttctacagtatatatacaattttgggattttttaagatgtaatggtacagctgtgtttttcttataattttgtttcttaataactttgatcttgatgacttttactttgtatattttaaaaagaatagtagacttcattttattataaatgactgacctcaattgatggggccattgaagattctgggtcgaggtattttattccagtgaaaagttatctgtaatgttaataatgcaccctttacagacacctgaaaatgattaagtctatatatttacctaaattgtcctgagtaaaacacatagtgtacatataaaccagaaactcatatgatgattggtgttaatttccaaatcaaccaaagaggagaaataccacctccactaactaacctatttttctaaacttttgaaaatgtaaggattctagctttagatagcatagtcagatccaagtactcctgcatctatgctgctgtgacattatattcaccaatcagacacgttaaattctaacaacctgtgcttccattattagcaattcccacaggtagcatcaacttccagcctaatttttattctacagctgtgcttcttcattctttcctgaaaaattatttgtggaggtacatgcctttgaagtttctcagcatatattgttatttgaggttgaaaagataagattatctaaatttttgccagaaactctcatacccacattatatctttgaaagcattggttatcacactgctgctgacatgtgcatgtaggagaagcatgtaaatgtcagcgctttgcagtctctaaggggctgaaataaacaataccggaaatcttggccactgaggctcacatgtagattttcattcccagtccaggcatctagattcaggggcaccttcctgagggccttttggttgaggccttcttcagaaacttttgttcagatccctgtttctggagaagaaatggaactttgataataatttttatagattcctattaatattcaattctctttaatcttgctcatacattctcctctacgctctcctgcccccttttccacaaaattgcgggcctgttttttatgagggtgccacctcggcagtgagacagtgccccatatttgtgctgatccatctgaccctttcctggtgcttttccatgaggaaaaaatggaacaatgaggagtcggtgcttgatctaatgttgcctgttgtttaacacaatcacagaaaggaagacaaaaaggcataactatttctttgatgtgggcctcttgctttaatttaaaactctgatattaagcaggttagctcttcccagctcagctcagctcttgaaatttcatggaagaaattctgtttttattggtctaaattttgtgtcttttatatagaaaaaaggtaataaaattgcatcttatatttaaaaattgaatgccttctgttttgccattttactgaagagaaaatttgtgtagcctattggcattattaacagtgaagctccaagtactaatattcagaaaaaataatgaatcaaaatccaactatttctcagtaccattttcttttttataaactttctattttattgtctgtaatttaaaaacttctgtggaaaagagtttaaaattttcaaagttaatacaaaattatttttagagtttctttttgcataatgtttgtcgtaagtagctaatattaataaattgtaatcatcaattcttatctaagctgcacgttaaaaaatatgttaatatttgctgctgcctaaaatataatacatatttacataatctaatttactaaaaatagtaataaacacatataaataatcaacatacacaggtcattttttctatttcttacttatattttatgtttcatatttgtatcagcacactttatgtcctagtatcatatatggaaacgtgcctattttgcatattgttatattaaataataagacatatgcttagcttcccctaggttaaattttttacataattgttattaacgtaaataatccagaaattaaagtttttaaaaaaatttccagtgccctcactgtgcataatataattctattttttaaagtgttagtgctgtttgcattatataaaagaatattttagtgtatcaactaactacatacctgaaagcatggcttactttttcattagtatatacttttggttgtactcggctatttttctaaaagtgcttgcaaatcagttccaggccacagggctttgtcttcaacaaaataagaatatctcagagacccacagaaataactgtaccaagtactcctataaacaggcttctgatagaatgacttacataactttgaaacactatcagtggactaagttatttctctaattctagcagagaagcatatgtgcttacaagatagagtaaaacaagtatgaataaaacaggactaaatgaactgacaaagaatgataataggttttgtttggaatgtgaacataaaacattcctgctattatttccttggtatctaaacatgagctaatgggagccgttgttacatgttgtacacccttaagaaggtttacagtttttcgtctcacctatattcgtagttgtctttatttgtggtttagaatctcagctcttttcatagctgcctggcactcatcttgtatgagctcctttgtgtttctgaagcctctggcatacaccgagggtgtgggtttgcctggaatgtagcatcaacctgtagagaacaggattttccatgacccagtcattgaataaacttgatatctgcttctgctgttgagaaaacattatttctccttcaggaatatccaccctcttcatcaagaacatcgtgtcattcttcagggtcacagaatgctctacagcctacttcctggtgtccaccaaggaggagattagttgcatctgaattcaaggaagattcgagagggctcacagctgcagaattccaatcactctcagtctgactgtgctgattttagaaagacacatggggatctgccacaaggaaggcactttgcagggaggcctcaaccccatggcacaccccttcaggagggctcttctccttgtaacagtcacttagccacttgtagaaaggcaactcttagaaaatttaaatggggaccaaaatactaaccctaaccagtttattatctcaaagaattggaaaaacaaagttttcgaatactacgggattagaagagtaaacaagatatgccttttctttggagctacatatatgtattaaaaatgggatgtacaaagaattttttatcacatggagaagtgcttatgagatgatataacattaaacaaattaatgaaaggcacacattaaaaagtataaccaaacttatacattagagctcaaaatttaaaatgtgtagaaaaatgattgagaggaaatatgccgaattataggaattgatgtgtttcttataggaagcaggatcctgtgagaaattaaattgctttattgattctcttgtaattttatagtttccaaaagttctacagagagtgtaatgtaggaccttagtcaggaataaacatctctttaaataagcagcagagaatttcaaaggaagtgtgtggtatgggtttatgtgtttctttcaagatctaatattttccacgtagtgcttcagaaaagataaggtaatttcaacaacttaaccccatcatcaagagggtgttacttaagtacattatgggaggtcatagataaacaaccagtcagcctctaagcatcagaaaatctgtgatgtccattggcctgtgagatggtctgcatttctttgaaggaaaaaagcaggttttaaaacactagaaccgaatcaaatccaaatttgaatagaaagattagaaaggcttatgcatgggaaaaagattcagggtattcaacggttaattctgactatttctgagtaatttaaatttacctataatttaaaaaaaaaattaaggtcaggtgtgttgactcaaacctgtaatcccagcattttgggaggccgaggtgggtgaatcacttgagaccaggagtttgcgaccagtatgggcaccatggcaaaacctcatatctactaaaaacacaaaaaatagccaattggtggtgtgtgcttgtagtcccagctacttgggaggctgacgcatgagaatcgcttgaacctagggggtggaggttgcaataacccaagatctcaccactgcactccagtctgggtgacagagcaagaccttgtttcaaaaaaaattttttttgtattttaattaggaatcaaataagataattaaatgtaaacttacacttaatttactttttaagcattttaagaattggtattctaattttgtgtcggtacattttaagaatcaataaaattatttttaaaatcaaagcaattttaaagcttttacttcattagactccctggcaagaaagccctgggaagatagaaagtttggaggatgtcagagggaagtttgggaaaagtagaggaatatatggagggcagaaggagtgaacattagggaaaccctcccctagctcagtcttcagatacgctggtggacttccccactcagcctgagtcaccttcgctactgacctcatcttgtcttctgactggatgctcctttcaggaagctggtgtctggaaaacttctcaattttagtatcaattattattcagaggctgaaaggcaagcctccacctaaagtgccagtcttggggccttggtgagaccctctgctggggagaaactccacttcactggggggttcttattttatacaaaatggggacatgacggggcagccaagcagcagaaaaccaaatcatgagcaagaaccaaactcttggggagtttgattctttctgctacatagtgcacaagttctggagagactataggggtgaagaataataaaagattttatttttgaatcatcttgcgtggttgcctgtttggagtgcagtagcgtgatcatagttcaccgcagcctagaactcctggctcaagtgatcctctgcctcaatatccagcatagctgagacaacagtttggaactatcacacctggctaaatgtttttaatgcttcaagttttttgtataaatggggtctcactatgttgacaaggctggtatcaaattcctggcctcaagcaattctatctcctcagccaatcaatatgccaggaatacaggcatgagacaccgtgcctggccagcgcctttataatgttttattctcccaagttcttctcaaaaaagtcaacatccaccaagtatcagctgagatttgaacttcaaccctgggctgaactcagtggcaggactctccattcccaacaagggacaaatggagaaataaatggtgagagggaggagcttgattctgcccatgctaattggacacctattgtgtgctaggaagacacacagaggtcaatccaaattccagctccagccacagcaggacagccatggtgtagaaggcctagcccagaggagggagccttagcaagcggaacacccctccatggagtattgacactctgttatttcagttatactgaaaactagtagaaggtatgagatattgcactcaacccttatgagcaagaaaatccattcaatcttctttaatttggttaaaactaacctttactaaaaggcagcaaacaataatgcttgtctgtgagaatttaaaaacatcatagcaaaccactccgttctcagtttaagaggaaaggcaaaacgcttgtgtgggagaataagaaaaaaaatatttatgtaatactttgagtttctattgctcctaaccaccattgctacataattattccaaattatagctcttatttacccatcctactgttaaaaagtacctcactgattctgtaacccccaactaatccaccctatagtccctagatgaccagagatgcctattatcctctgctttttactgtcactctccccagtccagcaaactcattcctcttcctgcataagcctcctgtgtttctgcctttttttatctgcaccctctgctgagattcttttgtcttcacccatcccaaagccatccatacttccactgcttgactaggggtaattatctcattcacccagcctaatttttaatcttaccttcctgctcccaccctctcttcactctgaacaagattttactaggttgttgttatgttctggggttcggagaatctgactagtgtgagtttcccaaggtaaaggtaatgccttaataattttcactttaattgctctttgcgcagtgttttgcacaaaatttaacacaataattgctcccagagtaaatgtataaatctttgcaatgtctgatttgactcccttagagtttggatcttttcccctacaaccatccagagtcctgtctaaccaaagtgaaaatgcggaactccctctttctggttggcatcactgctgagaacggaaataaatgctgtctatgccaactccctagaacaagtataggtttcatctagactagttttcaaaatgaggaaacaggatgcagacaaatactttattcccactttttggcctggggtttattaacaaggtgaaattatacagaagaataaattagtttagctgaaaaaagaaaaaatgtatagttaatggagggaaaaaattgaaaatgcaataaaaccagaagatgttcaggaattcaaagttgttgatgcatagaaatactactggtttttgtacattggttttgtgtcctaaaactttacttgcttatccatttcaggaggcttttcaagttttctccaaaaggagttttggaaagactttagcattgtctacgtagtgactcataatgcaaatggagaaagagaattcattttttttttctatttgtatgcctttttcttttctattggctgattgctgtggataggacttttaaatctaattaaattgtatttgttagatttttgtatattttaatatgtctccaattaattttatatctgtataatgtccccttataaaggaatatgtagctgttttatttagttattttattactgatgcacatttgagtttttttcagtttggaaaagtaccaaataatgctgcttagagcatttgtctgcattggaaaatatgctggcatttctattgggtgtatatacctagtagcagagttgctgggtcctagagtgtgcttatgtacatcgtgtatgtaaggagttactactcaagaggttttgaatgccgttataacagtttgcacacagaatggtataagaaagttccagttgcttgacatcatcactagtacttaattttgtcagttttcaaaaatgtgaatgattgcatagtggcattcaattgtagttttcatatgcattgttctgatgcataaggatgtggatatgttcatctacttgttggcccttcggttctgtatgtggaactcctagtcacatgtttgtcaattttgttcaatgtattgcatctttgtttattaattgatgggatttagttaaataaactagataaaaggcttttgccacatcaatatatgacaaatgttgatttccactttgttcttgcctttcagctctcctgaaggttttttttatgaagagaaggttttaattgtaataaagtccaatttgtcatatttttgtcttgagaattaatgcattttgtgtcccaagaaatctgggcctgtgccagtcatggacatatttatctatgttatctactagaaatattgctttcagctttgaccttaaaatttaaaatccacttttcattggaatttgttaataatataagataggagtgttttttctcacataaataactggttgactcaaggctatttaccgagaagactgtcttcactcctcttctgtgcctgttttgtaatatacaaaatgtccaaatgtgtgagtctgagttggactctcgagtttttctagttttctttgtgcctatttttgcattactaccatagatagcttttattactatagctttaatctaagtctgaatatatgtcattttaagctcacaaactttgttattcttcaggacagtttttacatttcttcgattttttatatgtatttaaattttttaaactgattagacagtttccacaagatttctgccaaaatattgtattgtgaaaatggaaatctatgaatcaatttagggagaagttacatagaaacaaagcaaaacaaaacactaataacatccaaaacaaacttaaagagaacaccacaataagaaaagaaattcccaaattggaataaatatttacaactcatgaaattacaaatgggctcgcatttccataaagggcactctctctctccctctctctctctcttttttttttttccacagagactcactctgtcaccctgtcttgagtgcagacgtgcaatctcggctcactgcaacctctgcctcccaagtttcagcaattcttctgtctcagcctcctgagtagctggggctacaggcttgtgccaccattcccggctaattttttgtaattttagtagagacggggtttcaccaggttggccaggctggtttttaactcctgacctcaaatgatccgcccgcctcagcctctcaagtgttgaaattacagatgtgaggcaccacagctgacctgtaaagacctcttaaaaattagttaaaaaacaaacaaaacagaaaaagagaaagaagaaacagccactcagttaaaagaaaaagataaagaaaaagaaaaagaaaagaaaagaaaaaaaggcaaaagacattattttacaggtctagtgccctgtgcccctcactgtaatgggggtggatatgggcttcacaggacatgaaattcatcaaacagttgctggttgaaggagggaaaatcttgcgggaccagcctccagaacagagcctgtggtgcactgtttcatcccgtagccctggtaagaaaacctggctgtgccgtgctttatgttcacctgcatttgccctgttcagaggcctgagctaccgtggacacaaaagtctgctcaaactctccccatcccaatattctatctggtattgagcatgacaccctgtcttcactgagcatgtgtttatgcagttttgtgaccacctatccattttacaacaggaagactgaggcccccaaaaaaggcaaagactggtccatatcccagaaattgggaagagcacagagtattagggagggatccagcttccaaggccttgcatgcaccccacccatcaggtttgctttggaaatgagtgctcttaagtcctggaaaaccctgtggtctactttctacctgggctttctacccttccttattctcacataggtgtgcagccatgaacacacaaacacaccacacacacacacacacacacacaggcttctaaggtggagatcatggaggtgaggttagagaagaggaaaccagagaagtgacaaaacgggaagaaatagaagaggcagctttgccatgaggcagaggcatccactcccccagctacatgaccaggagctgacagcatgtgatgaaggatcctccaggttccctgggttcttccaggcctggggatcttcccagctgtttcaagaggacaggacaggggttgtgactcccacctctatgggcacctggaactaaaatgagctatgccctcccccaaccaccccatgtgatataaagtgaggctacgggaaagaaaaccttcgttttctctctcataaataggggtactcaaaaggaataataccaagaattctagatactcataagtgtctgctccccttggctcttcattggtaactcactgtgctttgagactctgggaagaggcttttcaggttctagaggtccttcagagaagagagaggcctagagatgtgggcagatgaggacttggaataaagcagaatgtgacaatgcactgggctctggagtgtggggcccagaaaaaatactagatttttgggctgtccttgaggtcctcattcagaagtggaagaaaataatgtctctgaatgctgttaaagtgtttaatgagtgcacagcacactcaaagaggctgaggaaaataggaatcaagggaggtttccgaggttacttttatggcccttggagtcttcagatactgctccttttcccaggggtccttgaatagccactgccttgagaattccccaatgcaggtgcctgttttgtgatgcttccacctgggacttcagggctagtggaggcctctaggtggcggcagaccccgtgtttcttatgcccgctgggctttactggagcagctggagccgggggagagacaggctgaggtcctgcagctcctgttatcattcatgatctccacattattgggtggccaaaagtgggaagaagggctttgtgattttccatgttattttactcagcgactcttcccctagcactcaccatgtggcagctaccttggtaggttcaccttatggtaccaaaaatgattatgttatccctgcctccccgcggggagcccacagtctgaggacggcaggacaaaaacactaaagcaagtacatgtgaaagaaaagagcattttataatggaaataaagtagaatgttgggagggagggctggggagaggttgcctggaggggacatgaatgcctccctgaggtgacattatgttgtgaccagaatgacaacagagagccagtcctgcgcaggtgtgcaaagtgtgtcagggaaaagccactctttgtgaagagactcacaggcacaggtgagttcagcagaggaggttataacgggacaattgtggcggcaggcagcctgagaaagaaaggaaaagaggggagggaggatcctggggactgaaagaggagattagtcatttgcccctctctgacaaaatttccctgaattttagcacatgttgacaacaaatactatctcacaacttttgtgaaccagaatctcgatatagcttagttgggtgcctctgcctcaaggtctcttacgaggctggggctgtgatttcaactgaagctggatttgaggagagatcagccttctatctgcctcatggaaactggcacgattcagtgtgaactgagagcccgagttccttcctctcgattggcctgggcatctcctcagttctctatcatgtgggtctgtgcctagagcatcttaggacactgcagatcacttcctcatcttgaggattacaatacagagatgaaaaatgaaagagatagacagacatatgcagagaaaaagagagaaagggagacagagagattgagagaggacacacaggacagagcaagtaagaggaaaataatagctgttttagaaatataactttggaagttgcagaagactatgtgattccccaccatgttcacataccagaaccttaatccccagtgtaatggccttagcaggtcagaggtaattaagtccgaagcatgaggacctcatgatagcgattacgggctttgtaaaagaaaccgcagaaggctgtctctccctctctctgctaaatgagaaaacaacctgaagtctggagtttgaaactcagaagagagtccttaccagaccccaaccatgctggaagcccaatctcaaatttctggcctctagaactaatgttttttatttataagttgcctagtctatgttttttggtatagaagtctgaactaagtcagaagtgataacctatcacatttgttgttttccctttgacagaaactagaaccaggtccccaaagagttcatccaatgactaacagaaattcttcagtttgcagaatgacagataagaaaagatacaacttgttgaaagaatgaaatttattccacttatgagacttctaaaaagtggctaaaattggtcggaaccaatatggtcaactggagtctgtgtgaaataagctcactgatgtcagagcccaaatttccatcacatgttttgtactaactgtccccaaatttgcacatgtgatctgtgtgtagcaagaaaaaatagttgttcatgcccagtgattttccatacatttttcctttaagcaattccgtactaatccagaacctacctcctaaacctttctgagaatattactacctttaagtaagcacagggaaacagacttgagctggaatcccatctctctgttagaaacccggtgttatagtacctgcttctgaggcactgagaggtgagctgcgttttaaaataacagagtcactcacaacttagtgttgttgtgagactttgttgggggtgcccaccacataggctgagatgaggcatatacatatgattctaaatataatgcacagcactggaatatttaatgccagaagacagtatctgattttcttttaatttcaacctcttctgctgtggaatggaaaattaaggccatatatataaaatatatatcttttatgtataaagatacataaactatgtatcttttatatataaagatatatatgtataagtttatatattatatatagttatatataattgatatatatatagttatatataatatataaataaaaatatttatatacattatatatatatatattttttgagacacagtctcgctctgtcacccaggctggagtgcagtggcaggatcatggctcaatgtaatctctgcttcctgggctcaagtgattcttacacctcagcctcctgagtggctgggattacaggcatgcatcaacacatctggctaatttttggatttttcgtagagaagggtttttgccatgctggccatggctggtttcaaacccctggccttaagtgttccagctgccttggtctaccaatctgctaagattacagcaagagccactgcatccaaccgattttgattcattctatctcatatatcaccaaagactgtttttggaagttgatgttagcataatcccattatgcatacttcagggctggggagacctgaagcacacagtcattttcatatggtcacagaaatgaaaaggaaaagaagattttaacccaactctgttctctcaaacctggggccctggctgcatttagaactttttgggaattaagggacataattgtgtttgcataactgtttacaggtaaagagttgacatgggagaggagggtgagcaatcagcagcccagcagggactttgcgtagatttatggaggaaaagggctcaggggataaaaccttgaagaagttaacagacttcccttgtgacaaaacctaacagaatttagaactttgggaaccagaaacccacattctagagacagccctgtatctagctaacttcttgggagatgcttgagagggcactgtgttctcattgtgttatattcccaagctgttgcctgagaaaggctcaaagtgagagccttttctgacagtatacatactggctcagcctacatccttgataccactggccattcgacaagaggcacccacaggtaacacagtttagcccagggcaggtccgtccatgccaggccacctgtgtcatctaatctgggcaacccgaccctgcctaccattaccctgtgttgcaaggggagcaggaaaggagggggcttttcctcacaggggcaggttttaagacacaggaaccctggtgggtctgtcatgttcatacccaggtcacggttggtggaataaaaagttgtgagttgcggaccaagtacgtctactcagatgtgaatcccaaggccttaagctgtcctcgggtttcctcattggctgggggtctatgcagatactcctatgttcctgatctaggaaacagaatttctaatgcagatgtcacctggtggtaaaaacaaagaagacaattaacttttttcgctgctgggaacactctttgtagagctgcattaaaatcagtgagcagatatttgatgggttcaagtcccccatctccttggacaactggcaggttcaccacaccccccaagcatggcatacaatgagttatgttgagagcaggcacatggggttctctacagagagggacctgacaaaaccaggatgggtccaggatccagacccaaatatggaatttctctgcgctttctcctaggggatttccatgagtgaccctcagatctaccccccaaaaatctagccttaactggtcccagtggcaacttggttaagtgtaaagtccctttttacattcttgtagaaatatcagagaaggcctttgtgttgtttttactttacactaggctgcatttattcatgttactacagtttgtatagttttaattattcccctctgatatcatctgtagcaagcaggttcatggtactgccagactttctccaagacttgaaagccaccactatcactaatactctacaaaaatagggaagagtttacatgaaaaaggggttatattgtttcctacatttgtctgcaatgtgtcatctaagagaactcatcccagtagcccatcagggcagaagtggtgccctcacatctctttgtaatgttctataatgggggtcacttcccagagtggtttagcctttcaatggctattatttctgatcaaaatggaataaaactagaaatgaataacagaagaaaacaaaaatagcaacatatatatggaaattaaacaactcacttttgagcatgctcatgtttaagggttgtaagacttaatattatgaataatgcttatgatgtctaaagcgagttacagattcaatgcaatcccttttaaattaagaactttttttttgaaatagaaaaaggaaccaacaaattatatggaatctcaagcgaccataaagagccccaaaatgtttaaaaaaaacaatgttagtgacctcaccttttctgatttcaaagcacattacaaagcaacagcaatgaaaacagtttgtttctggcataaacacagacaatttttccaataaaacagaaggtagcacacatgtaaacctcacacatatgagcaaatagctatttgcataccaatattcattgcagcattattcagaaatgccaataggtgaaagcaacacaaattttcctcatagaatgaataaataaataaaatttgtaatataaaactaatggaatattacttagcttttaaaggcagaaaatcttgtaccatccacaataaagaggaatcttgagaacataatgctaagtaaaattagtcacaataaaacagatactctatgattctacttatatgtaatatctaaagtattgaaacttagaaccagaaaatagaatgatttttatcaggagccaggtggtaaggacaatgggtagttgtcatttcatgtgtactgagttttagttttgcaaaagaaaaaattttacaaatatgttgcttaacaatgtaaatacacttaacatgactgaactgtataagaaaaaatattaaagattctaaattttatgttatgtatttttaccacaatcgaaattaaaaatgacacccaagggccaagagtgatcactcatgcctgtaatcgcagcactctgggaggctgaggcatgcaggttacttgaggccataagttcaagaccagcctggccaacatggtgaaaccccagcttcatgaaaaatacaaaaattagccaggcgcggtggtgcagaactttaatgccagctactcaagaggcagcagctggagaattgctttaacctgggaggtggaggttgcagtgatccaagattgtgccactgcactttggcaacagggtgagagtctgtcaaaagaaaaaaaaaaaaaaaaaaagacacccgaagggagagagttacaaagtttctgaaaaattatcttcaaatcacataaatctttccttcacactaagataatataaacaatagatgttgaaattaagacaatttccatgattactcacttagacagaataaattattggccatcaaataagaagaaaatataaaagtcataaacaaaataggggcaatatttatacaggcaaacaaacagttaaatcattgtattaacaaaagacatagggatggttcatatttgacttctgccccacactgtcttaatgcatacagagttgaatattgttatacaatattatattatacaaattaaaacttaaaacaataaactaatataaggtgccctaccctaaaacatgaaacacagaaatgtaaaattgcaaaacaaagttaaaataaacattaacccccaaattcttatttgaataatgaaattcaaaatcataataaataggtagaaagtaaaaacacaattaactgatgtgagacagcctactctaaaaaatacagaaacataaaattataaaacataattaagagaaactttaatccataaaatcctgaataaacatagtgtccaaatgaaaaagaatcccaggtaactacaatttttaactcttcctgtgaatctatgaaaagtatgaattttgaattatttggatacagttagggcaacaacatttcagagaaaacacattataattaatacaaagagctgtgatgagaaagttttaaggaataagcatttaagtaatactagagaaagttttaaattatgctactgatgcattgctgcttttcttacacaaaacgataaggctgtaatctagcttttaattgaaaagtcttacatttctaaatatggtaacaatataaatattgtaaatacagtataaaacattgacatataaaataaaaattggaaataaattgtactattagtcaaataaaagttgggaaaactggaagaagatgctaatagtaacattgtgcctagagtcaattaaacatacaagccaaatattttaataaattataaattatataatttatacataatatatacatttgagcatgctattttacaacttctgaaaggaaattacagacaaatgtgacacatgataattcagaaagtgaaaacacagtcatagtaatcttcatattaaagaagacagaatcataaaatactaagtgagaaataaagtaataattgtgaattcaatatatgttgaacaatattctaatttcccttacggaaaaagtttttgtaagaaatcagtaaaatgagtacatacaataaaccatcctacagtagaggctgttggcatatagagtttacatttctatgattaggtcctactaagaaaaaggaaattttaaaataaaatacttagattttcctatttaataagataatttttgcctataaagtttttcagtctaattttcttgtagaattaggttttagccatcgtaaaacttgacattatgaagcagaaaacaggtgtcatctgtctctggtgttcctggaatttctaacccaaatgccaattcctccacaactcccttcacacacttctgaattgaagcacaacagatttattaaaattggcataacagcggtctccagaaatgtgcagagattttcccagatccccaaaatcaatgacaaactattcagatcatttaggttctcacaagattctgggaggactttggctttcagtgtgaacgcactggaagattctaagagagagggagagagagagaatgtgtgtgtgttgaaatcagaaccccaccttatgtgtttattgtggaaattgaaaatgaaagcctaaagttgaaaattaaaatcacacatgatagcacgttgcaaactgttttctgtgctagatgggtcgttctagggtgtaggaccctggaaacaccgttttcccctccttccggaaagagctactcacactgctcaaagcctgcatccacatgtaccatgtcgaagaccagctcaagagcctggacccatatgccaccttcagcagggttgactgcagcttcttgttcttcctgagcatcttctccaatggtgacctgagagttgcgggaggcattggggccaggattgaacagaggaaaaaggagcacggaggccaggtgctgaggaccaggccatctcacctggagagttctggccctgagacatccagaccagcatgatgtttaggtgcagacagctggccctgggtggccctgtgctgatcaccggcctcagcccctcaaacagtgggaaatggaagaatggcttggaaatgggccctgtcgacagtgtgtcacctgagcacattctcccaggggcccaagaggggccatcgtgtctctagaaccagaactggaaggtgaaactgccagggggaacaaggaagagggtcctcagttgggtggagggtctcacagcaagacgcctggcttaatcaagcttggccattcctgaagcacgttcagtgactaaaagtgcctaccatgagcagctggaacacactctctgagagctgcaagatgcatggggacctcaagtacctgtttgtaattacagccaaggaccagcaggcagcattgctgcatccacatgggcttttgctggaaccagtaagtctctgccagcccctcccaggctcctgggatgccacttgttctgggtctgtggacagataaccaggacacttactcagtgaagcccatcgctcaaccccagccccaccataccctgtctcctatgccattcctcatcccagaaggaaaggcaatgcctttgtcccacagcccctgccttgtgtcatctcatgtgggggtatggaatgaacccgtcagcctaaactccagtccttctgcctgaggaatctgtccccgctgtcttagtcgccctctagggagctgtcagtgggataaagagcagccctggaagagaggcccaccttcttctgtttgacttcaggacagcctttcagggcaagaacccagagcagatggaggcctcacagaaggctgtggcagggctctcggcttggtgggctaagcatctccctctctgatgactgccatggggcccacaaccactcattcaagagggtcaccaccacattgcaggtgttcagctggacggttccccaggcagagcctgccatggactgcatacacacagaggatgcacaccttgaagttggacaatgaggagaacattcctgaagaggtgcatgcagcctggccctgccctcactgggaacccccttccatctgggtactagacagaattctgtgcacttttctggaggctccatgctggtctgttcatttggaagtttgatgctgtccgtgaggaagtaacaaaagagatatctcagagcaggttgtggggcacaggctgagagattttctccctccctagtccctctgcagacacggggctggaacaagaacctgtggataatgagggaacttctcttcgagaaccggcctgagcagctgcttcaagaaagagccacattaaagtgcctatagcccctgatgagggaatggtagcctcaggcccgcctgccatgtgtgagcaggttttcttgctatcaggatgaaagcaaagaaagctggaatgagcccagccctctcaggcaccttgaagactgttggggttccttccagcccttctagccttatgctttttggcaggccactcaggcacctttttccagcctctgagacttccatgctctggaaggagagggtcccacttttcactaggctatggggccaggcccatccagctcccggcttccactaacaaccatggggctctcacctgggcacacactgcccaaacatggaccttctaaggcagaagatcatgtgtcttgcagttccagctttctagggcttaaaagttatcagtgctgttattaagatagggaagtgagaaaggaaaacttgctgtaaaagtttcccataatcttaccacggagatcatcagcacagatgacagcacaggtagggctgctggggaggctgaaggagagtgtccagcctgttctgccagctggtccttgccaggggtgtctcgtgacccagtcccttagagaagcatgcagatatctcagcaagtatctggaaggtgcagatcagggcaacccagcactactgatggtggagtgggcctacctcccatcaagctgtgtctccacagctgacccttgtaaccaggaggtgttttacaacatgtgcaaggcagtgagctccatcagctgtgtggcattcaacactcacttcaactcggacatctcaccagaaagcagtggggactggccaatgcagaagcctgcaaagtggaacagagcgtcatggggtgggggatgtggggcctgcctgctcatctgagcactgctccctgagggtgtgatctgcaggcttcctgaaggagggctgtgagctcttctgcgaggccctgagcctgtggaacatagctgaggccaagcccatggggatttgtgtctacttgcacctccttgctcatctcagtacactacaggtgactgtgccgaggtgggccttgagcatcccctgggctgtgtcagcaaatggctctgggcctggcctggcattgagggatggcaaaaaaggagcctggggttgcattgtcatcccctatggtagcataaaatgagagagtccagacctgcaggactggaaccctaacaaaggggttaggagactgctcactttccctcaggaacccatgtggaggagctgagggaggttaaggagaccctagggactcacttgttctgtctgggcttccccctgctccatcgtttgatgaccattttctgggaagagctcaggaacctcctgtgctctagtgagacggggcctcccctcacagggtattctgagactgtgagtgagaagctaacacagtgccttgcaatactcatgggagctgtcatcctctgtgaccatcacgtggccttgtagtgttcagactgcctggcctgcctggggtttggtgaggctgttttgtggtcaggtgctttagaagctcactttctctgcaatcaaacagtgactgttttcatgtctgtttatgggtttaaaaaatcctaatatttcctttatagtagttcaccttgtatgtgtttatttgtataaattttattagagtaaagagagcttaagacaatagcattttaaggtcttaatgaggcatagactttcatgtcacaacagctaatgttgacctccttttgctgcctttgtgtaaattacacataaaaagtgcagccagaggtgactagagctgagctgcttgggcttgcttgctggcctgcagtcaggtggactctggctgtgaggcagtgcccaccctggatctacatcccccaccccctctccttagtccctgagtaaccaacaaggccgtgctaatgagagggcgagtgatgggcatcgggcacccccatattatccgggaagatttgaatgccatctgggctggagctgttgggattaggggctgaggctgtcttggcttgtcatggtgccacccacagatgtgcctgccctgtgctgcttctccagaagccggctgcccatggccctgagcctgtcacaccatgcttgctacctcatgctgcttgtgtttgaaaaacccatcccgagatgacgctgctggatgtaagtcctgaaaagggggcatcacctttgtcctgggggattaggagctgaccagattcctcttgactccctcccagaacaagtggggcaggtgctgcaattaatgttgccccctagaagatgtgtttgcactggctgagcaaatatacgatgcagagacctaaatgaagacacgtgaatggggtgtgtggacatcagttagtagctgggaaacaggtgcctctcaggcgtctcgtgttccagcaagtgtggaatatgcctgtgcccatgagtgtagacatctgaagtgtatacatttggctgctgcttttgctgccactattcccaggcccaacctggcttaaagtccaggttttaagtaaaaagtaggaggctttttgccatacagctacttgagaggctgaggtgaaagcatcactggagcctaagagattgaggctgcagtgacccatgattcagccactgcactgacacagtgagacctgcgtgtgcccttctacagagaatagctctggggcatttggggatccctacagtcccggaccctccctgtcccctgctgcctgtgctcctttccttgcctgctgtcagagcctaacatggaggcggttgccaccctgtgagcctgagggagctgtgtctgactggaacttctgtctgaggttttgcgaagtcttacttatgaatatggtctgtccagataccttgtttcaaaggaagtgagcatgagctagcaagtgtagccaccccacagctgataaacaactttgtcttgtttttaaatcatcaatcttcatttcacattggaataaagtaagtgaaacctgctacccgagcctcgcccgtgtgttctgtaacccagactcatgtggttgtgtgggctgttgtcagaaatgttataaaaaggttatgcataaattagatcaaatataaaattatgcttataatgtcacttgagtgggaggtaagagggtagagtcacaggaaatctgttggggtttacacccctgctacttaccaagctcatgagagtgtggcactggtgaccatcacctgacattggtgacagaagagaaaaggtcgaagtgaaggccaggtaggagagaggtgccaggctgtggggccaggccctgcgcatgctgggcctgttaggtcactgaacatctaactacccgggaaccagctcttttcacatcatttgaggtaagacgatgggggagcactctccagaagtcacactgcgctgggagaatggaggagagtctacataccgccatcttagggtaggttttagattgagctgaactgtcttggagagctaatgagatgggaggaagacagtcccccaggtgcacctaacagccagagcctatgaagttaggggggttgtgtgggggtggcctttccctataagaggaggagcttaaagctcttaaagctggtggctgctgctctgccatccctctacagagcagtcaagtcctcagctgcaagaatatctgaatgtcttttggagtgttagagtcctctgtgtcttagaaattttgaaaagaaaaacaaatctcaatattaatgttgattagtttctctgagccaattggggaaaataaacgtccttcacctcaaaggtttaagtgacaccgaagggtagccaccagtgtctcggccactgaagcctcatgcatgctctcactaccagtttgatttgcagccccatagttgtgttgtactaaatattctttcctctggccttgtccagtgaacacggttcacatggctaacaccacttcttgagatgcgagcaccatgcaaagctgagaacggattgggttttgtgaccattgtgcctcctcctcacctgagaggcccatttttcctggttgattcattaagtgtattggtgctgtcagtcgcctctggacaattgaaatgacaagtggctgttgattcataaagaaaatgaaggctttagatgtgaaaccctcgttttctcttgtccttctcttaggtgaaagattttatttttttcaaaaggctacatactggtatcccagcaggtgtagtgtgagaactggcatatgttaggctatggtgtcagtgtggatgggcaattcttcaagatggaaaaccaagtctcactgagttgctggagccacactgacctttctccacatcccccaccatgggctttcacttttatcctgtgcttgaatttttttcacatacaaattctttatacacacacacagacacacacacacatatctcactctgtcaatgcagtggctgaatcatgggtcactgcatcttcaaattcttaggctccagtgatgctttcaaatcagcctctcaagtagctgggactacaggcatgcaaagctacacccagacaatttttaaatatttttctagagactgagcctacttatgttgctcagactcgtcttgcactcctgggatcaaacgataatcccaccttgaccacccaaagtgtttagattacaggtgtgagctagcactctcagcaaaaatatattttaaagaaccgttacaaccaaattatgagttatcattatgccactgccctccaccctgggcaccagaacaagaccttgtatccaaaaactaagcaaaactaaacaagaacaaaaaaaaaaaacttataaataaactttgaagattgtgtcatctgtgtccttccctgccctccaagctatcaatgttaaatataatggttattgagaaaatggttagatattattaagaaatttctatatatcttccagctgagaataggtattctgttgtggcccaaatattttctcaccgctaccttcagggtctaaactagcaaatcaggacacctgcagaggacagttggccgttttcaaatagaaagagaaatacccccgttcatgagagtaatccagtgattttcaaaaagacaagtcagactgacatgcagcgcagtcaggccacaattaccctggaataatcacttcacacagaatggttgaggagactttctaagatgagcaaatttgggcagcataatccttgcttatttattcccagcccccactgcccgcctgattcctaatggctaccctacaatgtggtcagcagtgggatgtagcgtggtgagagaggggctcagggacgggatgaaggtctttcctgcattatcaaaatgcaggttaaaaagttgttaaaaagatgtccaaatgttctaattcctactgttaaatagctgctaagatgcattatacaacagacccaggtaagggaaggagcatgtgcatttcaagtctcagctcacttcttaattagctgtgatactctgggcaggtgaccccaactatacgagcctgtgtgcctgtcaacccaaaacaatcctaagcaaaaacaccaaagcttggggcatcttgctacccgacttcaaactatactacaaggctgcagtaaccaaaacagcacagtactaataccaaaacagatatatagaccaatggaacagaacagaggcctcagtaataacatcacacatctacaaccatctgatctctaacaaacctgacaaaaacaagcaatggagaaagatttactacttaccaaatggtgctgaaagaactggctagccacattcagaaaacagaaactggaccccttctttacatcttatacaaacattatctcaagatggattaaagtcttaaatataaaacaccaaaccacaaaaaccctagaagaaaacctaggcaataccattcaggacataggcatgagcaaagacttcaggaataaaataccaaaagcaatcacaacaaaagctaaaattgacaaatgagatctaattaaactaacgagcttctgcacagcaaaagaatctatcatcagagtgaccaggcaacctacagaatgacagaaaatttttgcaatctatccatgtgtcagaggtctaatatccagaatctacaaggaacttaatttcacacacacacaaaaaaaaaacatcaaaaagtgagtaaagaatatgaacagactattctcaaaagaagacatttggctgggcgtggttgatcaagcctgtaatcccagcactttcagccatggaggcaggtggatcatgaggtcaggtgttcaagactagcctgggcaacatggtgaaaccatgtctctactaaaaacacaaaaaattagcatggtgttttggcgggtggctgtgattccagcttcttgggaggataaggcaggagaatcacttgaacctgggtggcagatgttgcagtgagctgagatcctgccactgcactccagcctgggtgacagagctagactccgtctttaaaataataataaataaaataaataaaaagaaaaggaagaaggagaagaagaagaggaagaagaagaagaagaagaagaagaagaagaagaagaagaagaagaagaagaagaagaagaagaagaagacatttatgtggtcaacaaacacacaaaaaggaaaaagaaaaaagctcatcatcactgatgattagagaaatgcaaatcaaaaccacaatgggataccatctcacaccatttggaatggcagttattaaaatgtcaggaacaacagatgctgatgaggctatggagaaatagaaacgcttttacactgctgggggcgggagtgtaaattacttcaaccattatggaagacagtgtggtgattccctaagtatctagaaccagaaataccatttgacccagcaatctcattactggttatatacccaaaggaatataaatcattctagcataaagacacatgcactcatatatctattgcagcactgtttacaataacaaagacttggaaccaacctaatgcccatcattgatagactggaaaaagaaaatgtggcacatatacaccatgaaataatattcagccataaaaagaatgagttcatgtcctttgcagggacgtgaatgacactggaaaccattctcttcagcaaactaacacgggaacaggaaacagaacaccatatgttctcactcatatgtgggagttgaacaatgagaacacatggacaccgggaacaaaacatcacacactggggcctgttagggtgttgaggtcaaggggagggagaaaattaggacaaatacctaatgcatatggggcttaaatcctagacgtcaggttgatagaagcagcaaaccaccatggcacatgtaaacctatgtaacaaacctgcacgttctgcacatgtattccagaacttaaagtaaaacaaactaacaaaaatgcactaaggctgagggggagtgggggtaggggcaggagtcaggcgggggtgggtgagtcctggagttttatccagtcattgacactgatgtgggaacagcccaatcaggcgcgcagttggagaggacaggagaggagggcgtggcttctggcgtttggcgggtctttgtctcttgctggcgctggcacaggaacttgggatccgtctcctctttcgcctcctccgctttgggagccccgggctactctttcacagcccctgttgccctgtgatctgtaggtccttggggacgcacagttaagatgacaggacatcctggaagctgggaaatggtgagtatacggggttcggcatcccgagaggggacagcaggctgtgaaaccggcaggaccggcccccacggttagctccgagtctcccgcagcttggccctcagtcccctgtggctgcaagatggccgctgggccagcatcgaggacccccacatccggcctggcccatccggtgctgtccctgggcagcgccctgctctgcgcccacagccatgagtatttcccagattgttcagggaggcctggtgggtcatcagggaaaaactgccactgggtgtttgcgtgggaggagctgcggcccgtggggtccccagtctctcttgttaaaaattaacgggagtctatgttaaaacgttaaccagtttatctgaacaaacagtgattggtgaaatggaaagcacccagccatgatttctggtccaccagaggggcataaaggaaaggctttcataagatgcatgagaaagcagcccaaattcaaaaattggttccagttatgtagtcaccttatttgaactatccagatggaaatgtcctggttacatattcagaggttaattgcatgtttgccattggttaaacgtgcattttgtttcaggctaagataatgctttataggaaatgtatttgagttaggttttagtttttgtttttttttttttaacctatgaacccaggacactagagccactttagtctaattttctgctctttaattattttaacactccagaggaggactggttttctcctgtgtttttttaatatatggcaagtggaacctctaatcgaccaccctgtttttcagcctaactcaggcttgtggtaaaattatcagttcccactttctttgctgcattctcaaatgcaacacaggagaacagctttcccttgcaaattcacaatgctgttaactatttgtcctttattatacatttcattaaagttttctattattggatttctttctacttctccctacagttctgcccatatttgctttttatatttagaagcctcccttttgggtgcataaatatatatagctatattcacttgacaaattaacctctattattattgtatggtaaactcatttcatgcttgtgagagacattgctagaaagtctattttgtctaatttaagcataactaccattgaactcctttggctattatttgcatggaatatcattttctatcctttcacttttagcctatgctcttaattcataattgagtctcttgtaagcagcatattacgaggtttaaaagtttcatttatccactctgtctgctttagtctcttttggctgttataacagaatatcacagactggtaattaataaagaacagaattttatttgactcatgattctggaggctgggaaggtaaaagaacatgttactggtatctgttgaaggtctagttgctggataataacatggccaaagatgtgagggagagacagcttttttttttttaatatataacagatccattcttgttaaaattagcccattcccataataagaacattaatccattcatgagggcagagtgcttatagcttaattaatttttaaaggttccacctcttaattctttcacattggccattttatcctaaattttggagatgacattcagtctacagaagtatctgtttagtagataatttaatctttttatttgtaaggtagtgataggtaagcagttactattgtacatttgtagttttctgtccattttaagtttgcttcttttttttctggttctgtctttcctgtggtattgttcatttttgttgagacaaagttatgctttcttgctcagactgaagttcagtggcatatcacagctcactgtagcctcaatctcctgggctcaagcaatcctccccccttagccacccaagtagcttggactacttggacatgtaccacaacacccaaggagcttatgattcttccaccttggcctccaaaagtgttggaattataagcaggagccactgtatccaatgtgtaatttttgttgtttgtgtatgctttaattactttctctttttctttactatgtttttttttcccccagtggttatcatgagacttatgtaaaacctcttgtattttaatagtctagtttaagatgataacaatttagagtattctgaatttcagtatgtatttaccatttttagtgacatttatactttagtatttttcatattgttagttagcatttcatcatatcaatgtgaagatttcttccagaccttggctggagaaggaaagaaggtgtgttttgcctgattcagggactatagagagaaccaagttctgcaggcctgtcacctaagtctcagatgagtatgaattcttttgtgtttttcacagatttttgcagtggcaggaccaagttcaaatgagtcatagccaagtttacagtaagatgtggtagtattctgttttgaaccgaggaccatgattggcaagcttgccacttggtcaagtgcttaccctctaaagatgtcttccttggtctttgcctccagctgggtgtcacaaactctgaactggattctaaggctttcatgaatgcacttatgtttcccgtggcagctgcattatgttgtgggggatgtgcatgccgaacctcccattctgtcgtcttgcttatgttactctcctttatgtttcactttctcaaatgaatgtcaagctggtgatttttagattcaaaaattctaaaataaattgctcaaatttccacattatgtaagctattaataaaatgtcttgtaggtgctacatatttattaaaatttttggttgtaattttaagctcactgcaggcagaaaggaatcattaacatttatattcttttttttagtctgtatctaaatgatggtatattttaattccagatatttactttatactgcagtaatgctcgtcatattttgcaaaatttatgttgttcttttatttggaaatataaggcttttttagctcttgaaatctatattatagtcatataattttattatgttttgtggtaagaagtgcagcaacatattgagaacataataaaattatcctgtatttttaatgattatttattaaattcctctcattagagcctgttattaatgattgtaatgtattttctgtataattttactgcaatttattaaattctaatgacttaaattgtctgcttttcatgagtgcacacagttgaatgctgtagatatctaaagaattatttttcggccggttgtggtggctcatgcctgtattcccagcaccttgggaggccaaggcgggtggatcacgaggtcaggagatcgagacaaccctgactaacatggtgaaaccccgtctctactaaatatacaaaaaattagccgggcatagtggcaggcgcctgtatccccagctactcaggaggctgaggcaggagaatggcgtgaactcagtggacagagtttgcagtgagccgagatcgcgccactgcactccagcctgggcaacagggcaagactctgtctcaaaaaaaaaaataaaaaaaaaaacggttattttccattgtaaatctatgttgtattcaggattttatgcacgaaaatctctcttcttattttcaagtccgtgttattgtgtttcttttcttgggagttatgttttctcagatcagttaaatgtatttttattttaaagcttgatatcatcagttgaaagataatttttagctcggtacactttatctcaatgtgatgtttaatatatgtgtgaattagctgtgtttgttgcttatagatatatctgtatgtttttcacttatgtaagtatgacatctttttccttgtttttttgtttttttcttttcagtttcagataggctttttttttttttaagagaattttaaaacagagtcgaaagaagagaaatcagttatttgtcctcttgcagggtggggagacaacttccttccccacaggtttgaggctatgcctaagtggtgagtcttgaggagatgcagaaaggatccatcccaggcacttggctggacttaagtaagcatagcctttaggccacaagacctgatggtttgggtactggtctggacataagtccccatcttcccagaaatatcatcttttgtctgcaacaactggctggagaaatatttcagaaagatgtgtgtctggaacacccaaagacatacttttcctttctccttggcataggccttgcagcactgaagaaagaccaggtttgcaatggagccttcaacagtcttcatccctatggaactcagggtctcatagggtgacaggagaggagacaaagctaacttgggaagagtctctgtccttcagcttctcccctactgaaacactatatattgggcccacagttcatcacaaaacacacatgctctctttctttctctcacacccaatcttgggaacccaaaaacttgatggcaggtagctctgggtatccttggtctggcattcacccactgggaatctaagctgtcctaaagctcttttcaatcacttctcactgtttccaggcccatgtgggtaggtgttccaggcttcattctttcaggctgatcataaaggcacagtgtgggaaaatcccctactgtgatggccattgctgggaagcaggaaaggctaagggcccactgctgcccaaggctagtatagatgccctctgctccactcatgtcctcaaagactgatatcaggtgcagcagctgctgtctggaatgttatcaaaccaggactgcacaggcactgcattctctgtgtggaagacgtaagaagcaggcgagttgtccaggatgagagttttcctcaggtccctccccagatggctgaggtcattgacatagcagccctggtggaacaaacgtgactcatgggctaggcaaccccagaacacctcacactggtccagcacacccatcacaatgtgtctggaattggtgggttcttgttctcactgacttcaagaatgaagccacagaccctcacggtgagtgttacagttcttaaaggtggcatgtctggagtttgttccttctgacattcggatgtgttgagagtttcttccctctggtgggctcgtggtctcgctggctcaggagtgaagctgcagacgttcgcggtgagtgttacagctcttaaggtggcacatctggagttgttcattcctccaggtgggttcgtggtctcgctggcttcaggagtgaagttgtggaccttcacagtgagtgttacagctcataaaggcattgtggacccaaagagtgagcagcagcaatatttattgcaaagagcaaaagaacaaagcttccacagtgtggaaggggacccgagtgggttgccactgctggctggggcagcctacttttattcccttatctggccccacccacatcttgctgattgttagagccgagtggtcttttttcacagggcgctgattggtgtgtttacaatccctgagctagacacaaaggttctccacatccccaccagtgtagctagatacagagtgttgattggtgcattcacaaaccctgagctagacacagggtgctgattggcatgtttacaaaccttgagctagatacagagtgccgattggtgtatttacaatccctgagctagacacaaagtttctccacgtccctaccagactcaggagcccagctggcttcacccagtggatcccccacagggtctgcaggtgtagctgcctgccagtctggcactgtgcacccgcacttctcagcccttgggtggttgatgggactgggtgccgtggagcagggggcgacactcatccaggaggcttgggcacacaggagcccaccgatgggggggaggctcaggcatggcgggctgcaggacccaagccctgccctgtgggatggcagctaaggcccagcgacaaattgagcacagcagctgctggccgaggtgttaagcccctcactgcctggggccggtggggccagccggcggctccgagtgtggggtccgccgagctcgcgctggccttcaagcactgcacgccgccctggttcccacacgcacctctccctccacacctcgtcgcaagctgagggagccggctccgaccttggccagcccagaaaggggctcccacagtgcagcgacaggctgaagggctcctaaagtgccgccaaagttggagcccaggcagaggaggcccggagagtgagcaagggttgtgaggactgccagcacgctgtcacctctcaacaggatctgcatacttgttcagtctggaatgaagagagcaatgaagaaaacacatttaaacagttcctccagtcatctcaggaactcatccatataaggcctcatggtcccctcaatctttacagtcactaggcagtcagcattgctgattggcttaatggagctatgcacaagggtttcatccatgtcagtgaccatacagatcgttccttgatttttctctgtcacctctgggagcaggcaggtccctgggatctgataaaactgatactggagacacttgagctgatccgacttagcaatggtgttgactccctccttatgtgtggagaactcagtgggggaacttgacttgccaacatgctgggtgcaagaacagcagaaaggtaccttctaagatgtcacaaacatgaggcctcttcggagagcactttggaaaccaggccttgcttgctaaggaccagggcatcttccctccatgcctgggtggtgatggagcctggttccatctaacaatcctgagggctcggctggctgggtgggaagacagcgggcacgttggctggactgggctggggggcatgggctggggcctgattcagttcccgagagtctgacttccacagctgttcacataccccttctcctttccatcacaggccgggaagagaggcggcctgtagggacggtggatggccttggcagcagctccccagggtgcccccagccccaaatcccccagcaggagcttcaggatcttcagtttgggtctaacctagggaatccacctcatactcatgttttttcaagttttattttaagttcagtggtccatatgtgataagcttttttttcaacttttattttaagtttaggggtccatgtgcaggatatgcaggtctcttacatagataaacgtgtgccattgtgctttactgcacagatcatctcatcacccaggtactaagcccagcatccgcagctattcttcctgctgctctccttcccctcccccatgccatgaaacaggtgtccagtgtgtgttgttcttcctgatgtgtccatgtgttctcattgatctgcttctgctaataagttagaataataataggtggtgtttggttttctgttcctgcattagtttgctgggagtaatggcttcaaattccaaccatgtccctgcaaaggacatcatctcattacattttatggcttcatagtgttccatggtgtatgtgtaccacattttctttatccagtatatcattgatgggcatgtagattgattacatgacgttgctattgtaaatattgctgcaatgaacatatgtatacatgtttatttaaaatagatttatattcctttgggtgtatgcccagtaatagtattgctgggtcaaatggtatttctgcttctaggtctttgaggaatctccacactctcttccacaatgcttgaaataatttacaatcccaccaacagtgtaaaagtgttcccttttctccacaacctcaccagcatctgtttttatttcttttttactttttattaatagacattgtaattggtgtgagatggtatctcattgttgttttgatgtgtatttatccagttatcagtgatgttgagctttccatgtttgttgggcacatgtatgtcttcttttgagatatgtctgttcatgtcctttgaccactttttaatggggttgtttgtttttctcttgtaaattttaagtccctcatagattctgggtattagatatttgtcagatgaataggttgcaaaatttttctcccattctctagcttctctgctctgatgatagcttctttggctctgtggaatctctttagtttaattagaccccattagtcaatttttgcttttgttgctatttcttttggtctttttgtcatcaaatctttcctcatgactatatcctgaatggtattttctagattttttcttctaaggtttttatagttttgggttttacattcaagtctttaatccatcttgagtcaatttttgtctatggtgttaggaagggttccagtcttaattctctgcacatgactagccagttatcctagcactatttattgaatagggagacttttccctaattccttgtttttgttgactttgtcaaagatcagtttgttgtaggtttttggctttatttctatgctctctattttgtttcatttgtctatgtgtctgtttctataccagtaccatgctgtttttgttactgtactcttctagtacagtttgaagttaggcaatgaccctttcagcttttttttttttttttcttaaggttggcttggctatttgggctcttttttggttccattttaattttaaaaagttttttttttctaattatctgaagaatgtcagtagttcaatgggaacagcattgaatctataaattacttagggcaatatgctcatattcgtggtactgattctttctctccgtgagcatggaatgtttctccatttgttttgtgtccactctgattcctctgagtagttgtttgtagttctccttgaagatatccttcactttccttcttagctgtattccttggtatttttttctctttatagcaaatgtgaatgaaagttcattcatgatttgtctccctgcttgcctgttgcttgtgtatgggaatgctagctacttttgcagattgattttatatcctgagattttgctactgctgcttatcaccttaagaagctttggggctgagacgaagaggctttctagatatagggtcaggtcatctgtaaacaaagataatttgactttctctctttctatttgaatactgtttatttcttcctctggcctgattttcctggacaagttttccgaatgggagttgtaatgcgagtggtgagagagagcatacttttcttgtgccggttttcagggggaatgtttccagcttttgcatattcagtatgatattggctgtgggtttgttgtatatggctcttcttattttgaggtatgtttcttcagttcctaatttattgagaattttaaacgtgaaggaatgttgaattttattgggtgctttttctgcatctattgaggtaatcatgtggtttttttatttagttttctttatgtgatgagtcacatttgttgatttgcatatgttgaatcaaccttgcatcctggagacaaagccaattccattgtggtggatgcactttttaatgtgctgctgggtttggtttgccagtattttattgaggatgtttgcacagtgttcatcaaagacattggcatgatgtgttgttgttgttgttgttgtatctatgttaggttttggtatcaggatgatgctggcctgatagaatgagttagacagaacttctttgtcttcaattttttttggatagttttaggagaaaatgtactatctcctctttacctcaagtcaaattcagcttgcttggtaggctagttcttactgtctcaatttcagaacacattattgatctattcagggttcagtcttgtagagagtttattttgcaaggaaattgtccatttcttctagattttctggtttatgagcatagaggtgtttatagtattctctgatcgttgttcttatttccatgggatcagtgatgatatctcccttattatttctatttgtgtttggttctttcttttcttatttatttgcctaactagtgttccatctagtttataaatttttttttttttcataaaaacagctcctggattggttgagttttttttttttttttttggaagagttctcagtgtctctatctccttcagctctactctgatcttggctatttcttatcttctgctagctttcaggtttgttttcacttggttttcttgttcttttaaccaagatgttaggctgttaactttagatctttctaatttttttttttcttgtgggagagtttcactctgtcacccaggctggagtacagtggcataatctcggctcactgcaacctccacttctcggttttaagtcacttctgctgtctcagcctcctgagtagctgggattacagatgtgaatcaccacacctagctaatttttgtatttttttgtagagatatggttttgctgttggccaggctggtcctgaacacctggtctcaagtgatctgcctaccccagcctcccaaagtgctggaattacaggcatgagccaccatgaccggccctttctagctttttgatgtggacattagtgctataaatttccctcttttcttggtttctagtgattattttattctatcttggtgagtagtcagggaaataatcttaaatttacaatcaacttatagtttaaatctaaataattaagtgagaagaaccctttgttatttgaaggggatgtttgaagattttgtaaccgtgccttttaggtagtcctaaatttctaattgtagttaaaaacatgccattttcatttctaacattttaagtatatggtttagaagtggtaagtatagttctatttttttttgcaataggttttagataatttttgtcttacaaaagtaaaagtgaatactcattaattctgaaacaagttagttagcttgctttagttagatagcaagagaagggtccctggaaagtccctggcccttgggtcagtgtctcatccctgcataatataaaaggaatcctggaaaaaatcaagctgcagacactaacaaggtaactagcacatggtgttgtgcttggagacctgcccatggctgcacagacagaaaaacctctggcatatttggataaaaacttgtacaaacctccagctcactgagataagggaacaagaccgacctggcatagaaatgcctttgtttgtccaggcacagtggctcatgcccgtaattccagcaatttgggaggcagaagtgggcggatcacctgaggtcgggagttcgagaccagcatgaccaacatggagaaaaatacaaaattagccgggcatggtgcctcatgcctgtaatcccagctacttgggaggctgaggcaggagaatcacttaaacccaggtggcggagtttgctgtgggccgagatcgcaccattgcactccagcctgggcaacaagagcaaaactacgtctcaaaataaataaattaataaataataagaaagtacatctcaaaaacaaaaatgaaagaaagaaagaaaagaaaaagaaaaaaagaaacgcctttgtactttgtgcagtcagtgggctcccaggaaaatgtttcttctccttttgtgggcataagcacagtgggctctggtgcattccggtcgacactctcctttatttggactgtaagtcagacctctgtgaataattacttcagcccctgattgctcccgggacaagctcctgcgccaagctttcactttagcttctgataagtcctgggccaatctaaatagcatctatgaatcatcccttcagctcctgattggtcccgggtcaaagtcctgggccaagctgagccacacttttttcaagacagcctgttaactaggcacatttccttctcttcctttcccagtccataaaaaccttgggccccagcctcacagaggtcaccccattcagaaactatctctgctggcaaagagctttcttctcttgcttatcaaactttcactctaacctcacctttgtgttcacgctccttaatctccctagaagtagaacaaagaactttcgatgctatctcagactatgagagactgttacatcttggtgcactgctgagactacaacacttggtttctttgagtttgactaaatattttacataggtgtaattatacagttttcctttttgactgtcttgttttacttaacagaatgttttcgagatttgtccttattgtagtacttttcaagatttccttatttttaaggctgaatgctatccagtgaatatacgtgccctgtttgttgaatctactcatccttaaaggtacatttgcttccaggtagtatgtttgtgagtaatgctacagtgtacataaatgtgcatatatctattccatgttctgctttgcctgtttgggatatttttcacacactgatttagtaccatgtgtattcccttgcttttgttgtctgattcgttgatgttacatcccccaaattattgccgagaccaattgtcatgaagcttcacccttctgtattgtgctaggaattttacagctatagattttacattatagtcttcatattttaaaattgacacatgtaattgtacaaattttggggaaacaattatgtatatatgttgtatagcaataaaaatcagagtacttagtgtaattattgcctcatacatttgttatttttgtggtgagaacattcaaaagcttcttctctagctatttttttatatctttatatattaactttttttagagacaggatcttgctctaacacacagattggagtgcagtggtgcaatcctagctcactgtaacctcaaacaatcttctaacctcagcttcccaattagctgagactacaggaacctgcctccatgcctggataatgttttaatttttcatagagacagggtcacactatgttgtccaggctcatcttgaacttctgacatcaagtgattctcctacctcattctcccaaaatgtatggatggcaggaatgtgccaccacaactggtctcttttagctattttgtaatttgagataacttttcattaattattattattctgctgtgtaacaaaaaacaaaaacttatttctcctatctaattgtaacacaatacttttgaagctgccttttcccatctccctgcttcagtctctgggaacccctgttgtactctttgcttatatcaaccctttttttcaggttcctcaaatgagtgagataataagatcataaagtatttgtgtttctctatgtggcttattttacttaacatggtatgctcaaggttcatccatgctcttttaactgacagaattttatcctttcttatagctgaatagtatttcactgtgcatatatagtacattttccttatccatttatctgttgctgtacatttgaattgattccatatataagctattataactagttctgtaactaacatggaaatgcaaatatctttttgacacagtgatatcctttcttttgtatatacatgcaggagtaaaattgctggatcatgtaatacatctatttttaatttctttcagaaacctccatagtattttctatagtggccatactaatttacaattccaccaacaatgtatacattcactcattttatatcctcattagtacttgttttatttatttatttatttttattatagccattctaaatgggagtgaggcggtacctcattgtggtttggattttcatttccttagtgattagtaatgtagaacatatttttatgttccagttagccatttttgtatcactttttgacaaacatctattaagatcttttgcatttttttaattagattataagtgtattttattttgagattttaaagtttcttatttattctgaatattagccttttgtcatatgtatagcctgaaagcattttcttttattgcctaagctgtctcttcaatcttttagtttttttaatatggaaaagcattttagtttgacataatgttgtttgcttatttttgattttgttgcctatgttttgacatgttattttaataatcctttccccgtcgaatgttataaagcattttttagtttttctctaatagtttcataattgatagcattacatttaagtctttagtttgaattgattttcatatatggcaaggcacaggggtctagtataatttttctgaatttaaatatttaaatggccctgcatcatttattgaagaaattagcttttccctaaagtgtgttcttggcaattttgttgacaatcagttggctttaggtgcataaactaacttctgggcttcttgggcacattagtctatgtgtttgtttttatgccagtacagtgctcttttggttactatagctttgtagcaagttttgaagtttgataaagtgatgcctttagctttgcttattttgctcaaagttatttgtctattcagagttttttgtggatccacataaatttaaaatattttttctatttctgtgaaaaaatgtcattgatattttgataaaaatattacctcccacagggtccctcccaggacatgtggggattattacaatttaagatgagatttgattggggacacagagccaaaccctgtcaattacttaaatccaggagttcgacactaccccgggcaatattgtgacaagctattggtaaaaaatattttcacagattactcaggcattgtggaatgttcctgtagtctcaggaagttggaggctgacgtaagattattccttgagttccccaggaacttgaggctgcattgagctataatcatcgtattgtattcctgtctgggtgagagagtaagacctctttttagaatttcaaatttattttagatttaggaggtacctacacaggttttttacatgggtattttgtataatgctgaggtttgaagtatgagtaattccatcaatcaggtagtgagcatagtactaagtagacagtttttcagttcttggtccctccctctctccaccctctaagagttgtctattatttttgtttttctgtccatgtgtacccagtgttaatttccatttataagtgagaatatgcagtattttcattttccatttctgcattaatttgctttgtataatggcctttagttgtgttaacgttgctgcaaaggaggttttttttgtttgtttttgctaagtagtattgctgtacatgtgacactttttaaattcaatttaccatcaataggctggacatggtggctgatgcctgtaatcccagtgctgtgggaggccaaggcgggtggatcatgaggtcaggagatcgagaccatcctggacaacgtaatgaaaccccgtatgtactggaaatacaaaagttagccaggcttggtggcatgcgcctatagtcccagctactcgggtggctgaggaaggagaattgcttgaacctgggaggtggagattgtagtgagctgagatcgtgccactgcactccagcctgggcaacagagtgagacgtcatctcaaaaaaataaaaaattaccatgaataggcacgtaggttgattcaggtccttcctcttatgaatagtgtagtgatgaaccaacaagtgcatgtgctattttggtagaatagtttattctcttttgggtatatacccagcggtgaaattgctgggttgaatcacagtttaactctcagttatttggaaaatctccaagctgttctccacagtggctgaactaatttacattcctattaacagtgtataagtggttttttccctctaaaaccccatcaacatctattatcattttactttttaacaaaaaccattctaactggtgtacaatggtgtcttattgtggtttttatttacatttccttgatggttagtgatgataagcttttttcatgttatttggccacttgtatgtgttcttttgaagagtgtctgttattgcccactttttcatggggtaattttttccttgtgaattctttaagtttcttatagattctgagtattagattttgtcaggttcataggttatgaatatttttgccattctgctagctttggggtaagttagtttttatttttctagtttctctaagtgtgatgttaaattgttagtttgagatcattctaacttcttgatgcaggtatttagcactctcaactttcctcttaacagagctcttcctacaacccagacattttgttatattgtgtctcttctatttcaaaatctttttaattttctgccttaatttttttgtttatccaaaattcattcaggagcaagttgtttaatttcaatatcattctgtgattttgtgagattttcttggtattgatttttatctttgttccattgtggcctgtcatattctgtgagcagatgagaagaatttactttctttagatgatgtgttgcatatactataaatgtctattagtttcaattgatcaagtgtcgaatcaaactccagaatttctttgttaagtttctgcctagataatctgtcaaacacttagtggggagttgcattcccctactattattgtgtgtctacttgaggcttattgtagttctagcagtaattgttgtataactctatgttccccaaagttgggtgcatctacatttacgatagttaagtcttcttgttgaattgaaccctttatcgttacgcaatacctttctttgttttattttactattaatgatttaaagctattttttcttaaaagagaaacaattccaggtatggtagcttgtgccagcactttcagactgaagcagtcggattgcctgagaccaggagtttgagaccagccgaggcaacacagcaacatactgtttgtacaaatttttttaaagaaactatacaggaggggtaatgtgcacaactgtggtcatatttactcaggagacataggtggcatgactgcttgacttccgaaatttgaggttacagtgagctgtgattccaccagtgtactctgtcccaggagataaagtaagatcctctgcataaaatgaaaaagtaaagaaaaataaaaagattttaagttaaaaaaataattcctagatctccacttctttaggttcacttgaatatatatttttctcctttgattaggttatatttcctggttgcttttacttactgtagttttgttaaggttttgatcaattaagaaaccactacctattttatcctttatgaaagagctttatacatgggaaaattgacaacattcagccacagtagtcatactgggagcttctccaatctgttgtcaaaatgtgtcttctttggactactgtatgtattttcttgttaataaggtttacctctgtttcctcttaggagcctttagtctcttcccttcgtcactgttgtaggcactacagtctctgttgttgtaagaagcatttatctttattctcagttgacccaagctgtcatttaaactcagtctctattctcatcaacactaaatgttaaaggaagcaatttccagtctttagataaccccggtataactcagtaagtcagaagtttgcatacgcatttcactcttttttctttcccaaaggagaatcatggaatggacagatttttatctaactgcgctgttctgtagtgcacaaatgtgaccaaattttcttctaaatgtggttatggttggcttttttctcatgtggggtgctacaaactcaactggctttgttcgcccaattgtagttaagttcatatgtcaatggagagaaacaggatctcaggttctgcttcaactgtcattgtcttctcagctgacctcattttgtacattagatttataaaatatatttactttaatctcatcaccgaatttttaaaaaaattattatttttcagctcttttagcaatatatccaatcaagacccagagaaaacagtacatagaagcttcttttcaaaaagtaatattgggaagatatgggagctctggccttgaacttttacacttaggagagtgggaaattgaaggataagtgtaaacggcacaaagtatgctatgatgaatataccagatacacagcaattacctacagcaaaaatgtcactgctagaagagctcaaaaccataaagtattttggaaaaagcataattaatgttgattcttttttctgaactatatatttatataattacataccaataacaatttttgaaacatatcatgtttttgaaacaaaatttagaaaatcgcaatagtggcctaggccaggaatatttcttctaatgctatccctcccatagtcccccacttcccgacaggctccagtgtgtgatgttccccttcctgtgtccgtgtgttctctttgtttaactccctattatgagtgagaacatgcgatgttagcttttctactcttgtgttagtttgctgagaatggtggtttccagcttcatccatgtccctgcaaaggacatgaactcatcctttttatgactgcatcgtattccatgatgtggacatgccaagttttctttattcagtctatcattgatggtcatttggtttgtttcaaagtttttgctcttgtgaacagtgccataataaacatacgtatgcatgtatctttataatagaataatttataatcctttgggtatatacccagtaatgtgattgctgggtcaaatggtatttctcattgtggatccttgaggaatcaccacactgtcttccacactggttgaactaatttacactctcaccaacagtgtataagtcttcctatttttccacatcctttgttgtttcctgatttttttaatgatcaccattctaacaggtgtgggatggtttctcattgtgtttttgatttgcatgtgtctaataaccagtgatgatgtccttttcttcatttgtttattggctgcataaatgtctccttttgagaagtgtctgttcaaatcctttgcccattttcgatgttgttgtttctttttttcttgtaaatttgtttaagttctttgtagattctacatatcagcccattgtcagacggatagattgcagaaattttctcccattctttaggttgcctgttcactctgatatagttttttttgttgtgcagaagctctttagtttaattatatctcgtttgtcaattttggcttttgttgccattgtttttggtgttgtagtcatgaagtctttgcccatgcctatgtcctgaatggtactgccttggttttcttctggggtttttatggttttaagtcttatgtttaagtctttaatccatcttcagttatgttttgtataacgagtaaggaagaagtccagtttcagttttttgcatatggctagctagttttccaacaccatttattaaatagggaatcctttccccattacttgtttttgtcaggttcatcaaagatcagatgattctagatgttgagtgttatttctgaggcctctgttctgttccatttgtcaatatatctgttttggtacgagtaccatcctgtcttggttactgtggccttttagtatagtttgaagacagctagcatgatgcctccacctttgttctttttgcttagtattgtcttgtctatgcaagaccttttttgattccatatgaaatttgaagtagttttttttctaattctgtgaagaaagtcaatgggagcttgatggggatagcaatgaatttataaattactttgggcaatatggccattttcataatattgattcttcctatccatgagcatggattgttttcgtttgtttgtgtcctctttcatttccttgagcagtggtttgtagttctccttgaagtggtcctttacatcatttttaagttggattcctaggtattttattccctttgtagcaattgtgaatgagagttaacacatgatttggctctctgtttgcctattattgcgtataggaatgcttgtgatttttgaacattgattttgtatcctgagactttgctgaagttgcttatcagtttaaggaaattttgggctgagatggtagggttttctagatatacaatcatgtcatctgcaaacaaagacaatttgacttcttctcttcctatctgaatacgctttatttctttctttcttttgctgattgccagaacttccaatactataatgaataggagtggggagaaagggtgttcttgtcttgtgcaggttttcaaagggaatgcttccagtttttgcccattcagtatgatattagctgtgcatttgtcataaataactcttattatgttgagataggttccatcaatacataattcattgagagtttttaccatgaagaggtgtggaattttattgaaggccttttttgcatctattgagataatcatgtggtttttgtcattagttctgtttatgtgatggattttatttattgatttgcatatgttgaaccagctttgtatcccagggattaagctgactagatcgtggtggataagctttttgatgtgctgctggattcggtttgccagtattttattgaggattttcgcatcgatattcatcagggatatgggcctgaaattttctttttctggtgtgtctttgccaggttttggtttcaggatgatgctggccacataaaatgaattagggaggagtacctctttttctattgtttgaaataatttcagaaggaatggtaccagctcctctttgtacctttggtagaattcggctgtgaatccgtctggtcctggacttctttttgttggtaggctactaattactgcctcaattttagaacttgttattggcctattcaaggattcgacttcctactggtttgcacttgggagggtatatgtgtccaggaatttatccatttcatctagattttctagttaatttgcaaagaggtatttataatattctgtaatgatactttttatttctgtgggatcaacggttatatcccctttatcatttcctattgcatgtatttgattcttttcttccttattagtctggctagaagtttatttattttcttgatcttttaaaaaaaccagctcctggattcattgattttttggacgggctttttgtgtctctatctccttcagttctgctctgatcttaaatcttgtcttctgctagtttttgaatttgtttgctcttgcttccctagtttttttaattgtgatgttacggtgtcgattttagacatttttctgctttctcttgtggggatttagtgctgtaaatttccctttcagactactttagctgtgtcgtattttactttttaagccctcaatcttcctttttcatcgtgatagtctttactgttttatgtttatgtaatgtaaaattgactacacaatttttacaaagattttatgaaaatattttattgagaatgtacaaaccgtcagtcaattagaggagaagttacactgtcataataaatagccacaaagcaaaacgccaaaagacatccaaatcagaataaaacaaaacattttaacaaaaacaaaaagaacaaactggcaacaaatatgtgaagtttatattacaaagatgctcacttatccactctaaagagagcttttagaatttgatttaaaatacggcaaagacattatcccacacttcacagaaaaaataaatttaagcagctgttaacacatgaatgtattatcaagctcagatataatcaaaattaaatatttgacaagagattctacagtttgggagaaatagaagtgtttttttcttttccccaggcccacaagtctagtttcttgttcttcttcactataatggggtttgtcatcagctccccaaaatatgggaagcacagagcaggtggtggctgaaggtggggtatcctgtgaaaccatatttaagatcagagcccttggtccattgtgttgtaatcagctggctcaggaaagaacacctggctgtccagagctctacacctactgcactgggtgtgaaaggaggcctgagaacccatgggtcccaaacccaccccactccaaattatcatccagtattgagaactctgacaccaaattctcacagagcatatgtttatgcagttttacatttaatttctcattacattacaattgggaaactgaggccccagaagaggcagagactggtccagatctcaggaggtgggcaggctccagagcattagagagggctccagcttcctaggccttggcaccgtcccacttatcaggtttgttttcgaaattagagtctgtagctacacattcaggagcacagaaaatgagcagattcagggttctgttcacatggggtcctctccatgtcagtttcaagataacaggactggggttctgcatccagctctgagggcaactggaagtaaaatgagctatgctccacctcagcctaatgtagacagtgcctacaggaaagcttgttttcttcctcataaataggggtgcctgaagtgggtgaccttgatgatttcacatactcataagtgtctgccagcctggattcttgctctgagactgcaaaaatgcacccactctgcagatccttcaaatcagagggaggcatggccacttgagaggcatcttgggtagatgaagatgagacagagttaaatgtgccagagcactggactctgaggctgaggtccacggaaaatctcagctactgttgcgttcttaaggtcctcatttgaaagtggtagaaaataatttcactggataaggggaggatacctcatgagtaaatagcacaaccaaaaaggtggaggcaaagagagggcaaaacgggattcctagttcactcattatacttggggccttcagatcctgctactttatcccctaggaccttgaagaaccagtgtcttgaggacagaaaaatcaaggtatcagatttgttcagtagtgctcctgcttggggctgtagggttagtgatggccaggaggtggttacagcctactgtgtttctggtgcccactgagctttgctggagcagctggaacaagtaacagtcacacacctcatgttgttatcagtgatgtccacattatcaggtggtcaaaaggggaagggatattagggatcccccatataatcacttagccagtcttttttcccttgcgctcaccatttgccagcgaccctggtgggtccaacatgtggtacagaaaattattacttcatgtctgcaccccccaacccaggaccaaacaatctgaggaccgctggacaaaagcactaaagcaagtatatgtgaaagaaaagagcaaggactataatataaagtagattattgagaagaaaacctggaaaattattgcatgggaggacctcaggcctcactgaggtgacttttaatccatgatgaggatgacagcagggaggcatctgcacaagcatgtgtcagggagaagccacccttagtgaaaaaactcataggtgtgagtttggcagaggtaaaaagggactagtttggctgcagacagcctgagaaagagataagcagagggatggagaatcctagggcctgggagatgaggttagatatctgctcctttctgacaacattgccctaaaagtcagcacttttcaacaacatataatatctcataatgtgtgtggaccagaatctggacacagctcagctggctacctctgccttcaggtcttttatgagactgggggctgtggtcttaactgaagctggactgggaaagcatgagcctttaagctgactcatgtgaaaattgacagggtttagtgtggctggagagcctgactttccttctctctactcgtctgagcaccctctcaccctttgttatgtgggtctctacatggagcatctcatagcattggagcttgcttcctgtgtttgaggaatacaatagacagaattagacaaaaaggtttacacaaaaagagacagaaagatcgagggcgcaaacgagaaaaacccagtaggagaaaaattagagctttaaaaacatcttgacagggtgcggtggctcacacctgtaatcccagcactttgggatgctgagacgtgtggatcgcctgaggtcaagggtttgaaaccaacctggacaacatggtgaaaccaccgtctcttctaaaaatacaaaatgagctagatgtggtggcgcatgcctgtaatcccagctacttgggagactgaggcaggagaatcaattgaacctgggaggcaaaggttccaataagccgagatcacaccactgcactccagcctgggatacaagagtgaaactgtgtctcaaaaaaaaaaaaaaaaaaaaaaaaaaagaaagaaagaaagaaagaaaaaaaacttgagagttactataatttttcttctatatttgtgttaaaattgtaaccccgggcgtaatgctataaggaggtagaatgtaattaaacccttagggtgggaccctcataatacagattactggctttatacaagaaaccgcagagggctctcatcctcctgcaaaatgagggtaaaacctgaagtgtgcaggctgaaattcagaagccagtcatcaccagatctcaaccatgctgacaccctgatctcaaatttgaacctctggaggtatgagaaattaagtcctgttgtctatatgctgcctatctatggttctttggcatagcagcctgaactaatacaaaagtgatatccttttctgtgtttcattggagagaagctgaatttgtaccccctatactgttaaaaaaaaagacttaaaaaatggatcttcagaatgaaagataggaaacggcttgttgaaacactaaaaatttaactgctataagttttttaaacattggctgaaattgttggaaccaatattgccaactgaagtccatgaagcatcactttgcagactttggagcccaaatttccattgtgtgcttcatactaactctccctgaatttgtatgtgacctgtgaggaaacaagaagagatgactgtatatgtctcatgactttccatattcctactttccttccagcaatcccctacagaacccacctattaggccttttctaatcactgccttaaagccagtatgacaaaacaaatttgatttgaactcctatctccttgttagccaacatacaagatgatattttcctcaaaaccgaagggccatagtactggcatcaggaagtattccattttattcaataaaaaactgagtcactcaatacctagtactgggagactttgtgaagacttcctctgtcatagacgtgataaggcacatggatatgattctaaatataaagagaaagcactagaaagttgaattcctgtattagatcattctcatactgcaatgatggagtacctgagactgggtaacttataaagtaaagaagtttaattgactcacatttccacataattgtgggggcacctcagaaaccttccaattacagtggctgacaagtgaagtgagtgagagcatgggatgtaccagatgcttatgaaactatcagatctcgtgagaactcactatcacaagaacagcatgaggagaacccgtccccataatccaatcatctcccctcaggttttcccttaacacctaggggttataatacacaatgagttttgggtggggacgcacagctaaactatatgaatgccagaggacagtatctacatttaatttcaacttcatactggagcagaatgaaaatgaggcccagtggagaagtgatatttccaagatcaccctggcagacaccaggcctgtttgagttgtggcccatgctacctcccacctattctcctaatgcttccatctctaagtgtatgcattatctacaggtgacactacatcattatttttatgtcttatcttatatacacctaatacattccctaggaagtagatgttagcatcatcaccagtgtgcatgttaggaggctggggaagccttgaatacagtgacttttactgggtcccagagatggtaagaaaaacaaggttatgttccagctgtctcttctatcctggaacccaggttgcatttaggtctttccagggaattaaggggaagttgtgtttgcataattgtgtacaaataaagagttgacatggaagaggagactgagcaatcagtagcatagtggggcctttcggtatgtcttacagaaacatggggcccagtagatggaaccttgaagagtttaacatactttcttggtgtcagaacccaacagcagttaagaaaccaggaatccacattcttgagacagctctgtatccacctctgtttgtgagagttgctcaagagagtgagatgctctttcattgtgccctgaaatttctgagtttcagccttacaaaggctcaatgtaaaagtcttatctgataacacagatgtcaactgagccctcatcactgatgtccctggcttttggccgggtgcacctacaaataacacagggcagcccaggacaggcccctccacgccagcctctcttgtcaactcatctgggcagtcccacaccacttcttagtaccatgagttggatggggagcaagagggagggcactcttcttggactgaagtagattgtcgggtgttggaactcttgtgtacctgtcatgttcatacctaggccatagctggcagaataaaaagaagagggttggagaacgagtctgtgtactcagatgtgaattccaagactttaacttgtcctctggtttccttccttcatggagatttatacagattctccttatgtgcctaatctgaagagaagaatttcttttattttcttttttcttttttcctttcttcttttcttttttcctttcttcttttctcttttcttttctttctctttctttctttcttctttcttttttttttctttctctttctttctttccatctctctctttctttctttccttctctctctctttcttttttatttatcatgaagtctcactctgttacccaggctggagtgcagagaaaagcagaatttctaatggaggtgtcacatacggtcaaagcaaggaagaacacagacttttctttgcgtggtttctaggcacatttacaaagctgcattcagattgatgaggagcttcatcattcagtttaatgtggccaactcctccctctttttggaaaaagagcaggtgcactaaaccagcaaacacagccagcactgggctgtgctgagagcagccacataggggtctctacagacagaaagctgagaagacagggaaagaaacaggacccagactcaaatatgaaaaatctctgggctttgtcctacggccttcccatgagtaactcatagccttgttccagtggaatctggccttcactagtctcagtggcaagttggttatgtggaaagtctctcttcacacacttgtgcgaataacggtaaagaattttgtatagttttcactttacattaggccatgagtatttatgcctgtggctgcagtttgtgttagtttccggccccacgtatctcctgcagcatgcagcttcagtcctatcggaccctcaaaacttaaaagctaacactattactagggaggatttcgcaggaaaatggagaaagggttacacacaaaaaaggttaaactactctatgcatgtttctgcaatgtgttatctcaggaactcatttctgtagcccatcagggcaggagctgggctctcacctgttgataatattccataagggaggttcttccccacagtgtttagtctcccgacgctggtacagcctgacatgatgacattctactttcatgtcggtcatgctgcagggaaaattctgagtgttctaataggctggaatcatttgctagggtgaaccccatctttggttctcacttttctgttatcttgtaattagctttattctcagcaaatccatgtctattttatttatctgtttatttacttatttttatgtatggaaaaacacttttttttatttacttatttatttagagacaggtctccgtctgttacccaagctggagtactgtggtagagtgctgtgatcatggctcattgcagcttcaaactcttgggctcaaatgattctctcacctcagcctcctgtgccaccatgccctgctagttgattttaattttttataaagaaggagactcattaggctgcccaggctggtctcaaactcctgggcccaagcaattctctcatctcagcctcccaaagcactgggattaaaaacatgagccactgtactgagctgtgcctacttcaaaagactgaaaataaaaaatcaataaatctttgccaaattaaaaaacaaaacaatagtttccaggtcttagacaaagacaattctgtgtcatgaagagtggcaaaaggcttatttagctgttaaaatgatttgcttatatttcaaagaagcagagaaaaaaagatacatataaaagttttccaggccaggcacggctgttcatgcctgtaatcccaacatttggggaggccaaggcaggaggatctcttgaagccaaatgtttgagtccagtacaggcaacatggtgaaattctgtcaccataaaaaaataaataaaataaatatggctggacatggtggttcacgcttgtaataccagcactttgggagtcggaggcaggtggataatgaggtcaggggttcgagaccagcctggccaaaatggtgaaaccctttctctcctaaaaataataacaataaaaaattagccaggcatggtgctgtgcgcctgtaatgccagctactcaaaaggttgaagcaagagaattgcttgaacttgggaggcggaggttgcattgagctaagatcatgccactacactctagcctggcccacagagcaagacactgtcttgaaaaaataaataaataaataaataaataaataaataaataaataaataaaaagttagctaggcctggaggtgcatgcctatagtcctaggtaattaagaggttgaggcaggaggactgctcaaacccaagaagttaaggttatagtgagctatgattatgccattgcacttcagactaagcaaaagagtaagattccatttcaaaaaattactaaaaaaagttctctaaattacattgtttaagaaaagggaaaagaaaaaatatcttttttaattttcaaatgggagaatagagcctctcatttctaatatgtatttccttctgcaaaaacatggtctaggcccatggtcttgaactactggacatctgaattttagtaggtgctggattcaggcaactgaggggtggcttggacacactaagtgcacgtaaataaaaggtttgaggtgaactaaaaggtaaaagaggggaaggtgctattaagaacccacagttgggagacagtacagggttggtggaaggactggttcatgctacagatactgacccaggtgaaactttactctgacttatttctgtgtccatgcaggaagacgagattatgatcaggtggcacagaaacctgggatggtgaaaaaaccaggttgcccctgcagattcggtgtctgaggtagaacgtatgccaggggtcttgtaggcacatgtgtgggtttttggtgggaaagtctatgaggaaaggtagcatgggcaacaatcttgatgccaaagccttgtcctgagaggggcttggccacatcaacatgcagtgtgtatgttcagtgggtgaaaaacctgtggtggcctcaggttggcaggagggtagaaggcatctgttctcagaacttcttccctcagagtcgtcggtccttcttaccatgggagaatgcctggaaccacagggcagtgcatggtgtagcagcctgtgtgcagagcagagcctaccttccccgagacacctggagtctctctccagcagaggcccccacattgtctttctccttacaacacttttgatcctaaatgtgtaaagttccctgaaaacccactgcttctccaacacccatttgttgccccaaaatttaattctgacacaacttagagttcacacagatcccagaaattcagggctcagtcccacatcacccctctcactgtagaggagagttacacatccctgaagcccatctacacttctgagctacctcctataaatctgagactagcataaaccccttttcaagttaaataatttgatagaattactaaaaagaaaacctcaacaaataactgtaattatatttactactttattataaaaatataactcagaaacagccaaatggaagagatgtctagggcaaggaacagttgtgggtgaaggcaatcctggaaatagctatatttaaagaaattcccccattctttgcattctcaaagaacagcttagtgaagagaaacgtgcttcccctgatgactttgaggatgctccctgctgtttttttaacctatcacaaaaatggacacagattgcaaattcccatttttaaaaatgaacaaccattcagtaatttagtcttcagtggtccaaataacatactcttaaagaaactttgcttgtttctcttcttccaaccagcccctgaactttgactcacccacagcttcagcaaacctacaacccttatttatacatacccctcctaagaacaggctgagttcaaggtgaaacattatcttatctgggatcgcattttgctaccctccatcgtgtgcttcctttccaaccttctttgtaaacttgttttctcctccctatgaaataaggcccttttccacctaaccttagagatactcaaagatctaatcatttgtactttttctttgttgcaatacttcttaggtaacttcttagaccaagtctagaaacagtctgaggacaataacaattccattctaaaaagaatctcccaacatttcttctatctcaacctcaactgcatctgcctgtgaacttccagcttaccaaggctctatatcttctggcagtgacaaaggctccttccatggttggtgtgagtaggcttggacacctgcagggcagacacccaggaataatcaactgggccttcagtggtcctcttttgcagggtcaaggtgggccttagcttttagtcaatggtctaagacttctatttaccagttagtcattcagttagttttcaattcaaaaaatacttcatgtttgaagaatccagcaaaaattattcaaatctaagatataaaagagaggaaattacagccgggcatggtgactcatgcctgtaatccctacattttgggaggcctaggcgggcagatgacctgagatcaggagtttgagaccagcctgaccaacatgaagaaaccccgtctctgctaaaaatacaaaattatccaggtgtggtgttgtatgcctgtaatcccagctactcgggaggccgaggcaggagaatcgcttgaacccaggagttggaggttacagtgagcagatgtcttgccattgcactccagcctgggcaagaagagtgaaactacatctaaaaaataacagaataaaataaaataaaaacattataaggggcttatatcttataattcatcaagaaaagccaaagtatctatccctttcagaaaataaacatgtaatttaattatgttcaaaacaaatcatttagtaaacaattaatcatatgtgaacacttccaggaggtgcaaagtcccagctcctaaaacttaacattaccctcaaacacccagatggcagcatatggaatagagttattcactttcacaagttctctcttttgaaaaaaagaataacttatgtgataaatttatgtaatttgacaattaatctacctcatgtgcttgcagatatgtattcatttcctaccaccgtagtggaagagagattttccctatctttacaactgatagcatttccaacagtaagctgtgagattctgcttgaaatcacctctcaaacaaataaaaaacagacctgggagacatgctacactcattctgctgaggaaataggtaagtaacaatttttaacaaatgaaatacattactacttaattttattcaaaattcaccaacttaatgtgctttataaatattctcatacctttgaagctctactgataaaacataatttacagttaatgaaaaagtgaagttaaaataaatacaatcatattttcaaggtgacaaaattagaaggtgacaatggtgattgaaacacagacatatctgacccaagggtcaagtcaagccgttctattacttgggatattttccctgcttctatctggttcagtgatgtgggtcatgagcgtcctaccaggagctgctacgctctgctccactgtgtctgtgaggtgcattttactttgcaggtttttgcactgcctcactaggttgggtttctttgtcctttgaaatattttctctcccttcaccaatctgaggacattttttcctcactattcagcatccagttgcctggcatgcaatgtgtctctaaggaatggaaactaagcgttggggtaagaaattcttaatgtcctaaagggtttgcttttagcgcaaatgtatacgtggagattccttccaggtatagtgcatccaaccactccaaaaagaggctgcattcccataccttgggctgttccctgagaggagatgacacaagggatgttatttactagacacttcaagagtcatggccagtgttggtatcttggggattctcaaacagttttgaaacccaaaaccaagaaaataacacaagatggctgaggatgtattgccctgtgaggtttctgaaatgaaacctcaacccaaaaacattctgatggggtgtctgtgccaagggaagattaaagaaaggggcacaaatattttcttttcttttcttttctttttttttactgtggattgtcaggggattattatctgctttcatgtcctgtaaaatgtttacaaatgaaaaatatttttttaagtgtcatccactgctttttgaaaaaatgcagaattaaaatactgtgtctaaaatgtacaataaagaacagttgataatgttgtgagttacacaaggttagttagtgttggtaagtgtcaggaaagaactggaaatttaaactctgacagcaagccagagttaggctggggtaacagggtggtagatttgaggctcttcttgccacacatttggaaaatgcatgagaaaactaattctcttttggagcattaaaacaactaaaaaacaggcaattgcgttgaggtggctctagtgtcctgagctctgagtagagagacaggcaaaggcatccctagatccaaaaagctgcccattcttctccagctgtgcacctgattagataatttccactccagcacccatgattggatatagttcaattccccaccaagccccctcaggccatgagtgacatatgtgatttgacactggattgaataaagcaagaattataagtttttcctggatccttttctggcagggcttccttcatgcactggacactggccctgcctgtaaaatacttgcattttcatttgtgtgtaagattatttgtatttatgaaaaatatatatgtgttattcatacatggaagcaatataatgacaattgttttaaaatttcagatgttttactttcctggcacatccaggttttagagcaggcagcctgagatttcaaaaatgaggcaattctctaagaaataatatgtgaggcacatgtgaattttaaatattctagtagctacattttaataaatacaccaggcatggttgcctgttcgtgtaggttgaactgtttgggagactgatgtgggaggatcatttgaggcaaggagtttgagactagcccaggcagcatagagaaagccatctcaacaacaacaacaacaaaattgaaaaattagccatgcctggtgtatgccttcagtcccagctactcagaaggctggagctggaggatcacctgagcctgggaggtcaaggctgcagtgagccatgatcacaccactgcactccagcctcactgacagaacaaaactctgactcaaaaaactgatctctggaaaggcattttctttttctgcaacgtagccaaatagctaaatttgtattgaagccatcctttaatttttaacagggcaagaatattttctaagaccccgaactccagatatgcgatggggcaaatcctgaagcgtacatggctatctctcacagctaaagcacccctcacccctatccagcgcttcttacccctggcgcaagagagtcacctgcggggaggaaaactatcaaaatcccttaaacccaagttgtaaccgcacaactaaatcagaatccttggagctggatctgaaaaaaatacggttgaaagttgtgcaggtgattacaatgtgtaggcaagccagaaaaccatggctttaacgagcagcttttgttagaaatgatttctcaaatgaatgtaaaaacgtttgctgctgaattgtgacctttcaattttacctgcttttcctgcaaagtatattttgcagacccaggctggcttgtccttctgttcatggttcacccagtgccgtgtgtgctcagtgcatcctgtgcacgggtcactgtgctgtgtgcgctggccggggtgagcatcattcttcggggagaacctttctgaaaacaaagctgcaatccaaaaagttaaaaccatgctacttactgtactgaggtaaaaattaaaagacctaggggactcttccaaaagttaaaacgtaaataaatatcttggaacattaatatacacctgacgatgtcctgagtgaacacgccccactttaaaacaaaacaaaacattactattattctaaaatattaatttaggattgttatgcaaatatgtactatttaaatatttattgatgaataacatgcatacagcaatataggaacaaaatatttatggaatgcttgatgaattattactaaataaatacacttgtgtatgtaagaatcagatttgctcatgcccttgacactttctccttcccaaaggtaaccaagaccttaagagctaagtgtagataaactttgtcattttctacacgtgttttattacagaacattaaaaacgtatacataatacaaaaaaaggataacagaccagtcacccagatttaacagctactagtcatgtgtcatttttgtttcacctatacttccagccatttccaccccaatttcattattttttagcctttttggataaaatgtatattcattgcaaggtacaatgtgaactgtgaatagtagagagatggggtttcaccatgttgaccatgctagtcttgaactcctgtcctcaggtgatccacctgcttcggcttcccaaattgctgggattacaggcataagccaatatactcagcctgagaattttttcatacttctaagaaagtacaaatccatagggcacatgagaactgcaatgtctatctacagtaaatacagtttgataaataaaatgaaaggcaattgacctaaggtgaaaagaaaaacaaaaaacaatcaaagcatgggtactatgtgtcatctgtaagagcatttggttaagaataacaaacaaaccagttttatcgttttaatagccgaaattggcaaaatttctagtttttctttcataggaatgctctttgcaagaaaaaattttcatatagtgagagcaaaaatggcaaccatttgcaagtaaatgtcttatgaaattaagtagcagatatcaagctcatgaccttcagatagttacccctaactcaatcacttacatagcaagtgcagataattttcatagctccctattaaaattatatttgaatgcccttacaaattgtgactgtttttaaataaagttgaccaactaaaattttgtatatgacatatgataaattccccttcaagtcaccttacatttacttaattttattaggcagtgtctgtctaccacccaataatacttgacgattctccctccatttgcacaggcatcatagctgggaaacggattcacaagacccaggctgttccctacatatgtttcctcctccgacatcagttcatcagtcaatcaagccatgtgagagtggaggccttgtattccctattattcttgggcactctactccaagtaggaaaaggccaggaggtcctgttaaaggatgcactcagagcccgggctccctaacatatgagagtgctaaccagcaggtgtagacttttcaggagtgaagaatgaggcaggcattccaaacctggaccttcatcaccttttgtttcatctcaagacaattctgagggactgttttggagcgtgtctggaaggtgaaccttgaagaagagtgtgggctttgatgtgactcagttgagatctttcatggggaggcaggaattcaatgcccagaatctgggctggtgtctttgaggtcagtaggttgcgtctttgtatccaagtccattgttactaggttggaggctggagattctaaatggcttccagaccatctctctgattctctttgggagatggggtctgaaagacaatgtcagtagttttgggaaattctagaaagtgtgcttggaaacgtgggaagagctcttgcctagtgcctaaatgctccatttgcagctctagccaagtagatacttggtaggtatagagccgggtttgcgtttatatcagcaaaacctatgtcagagttgaagaagtagtcaggaaaaagcgtcttggtcgcaggccggggaacatcttaaaagcaaacttctagcctgctgactcttggcaatgagtgttggatcctggctaaagtgccttgaatgcagcatgaggccaatccatgaatccaacttctcatggagaaatgttaatattttttcagtttgaatcaatcagggtgaaactaccatgctattggtttgcttactttttattatttcatgtaaaatctaagacaaaatacattaaatgcttattgacatatgtatttattcttcaccaggctgataatatctgcctaattttaaactttcttccattttgtaggtttcaacttattctattgtaagatactgttaaatctaatagaggcattgtcacttttacgtataattttattttatttcatatatttcctattggctttttacatttaaattatggagcacttcatcatataaaaaacttcaattatatttaaacagtaagtctttggatttttttgccttgtaatttccatattacataataatgagataaacattaatgttttcagggtactttaaattttagataattactcattgtattcatgtgaaatttgtttttactgcatgtgtgggttggaggactgttttcacttctgattcatctttactcttatctcatcagagctcatacctcttgtagttgggggattgcagtttataattccaataaatggggcaaattcaataataacataatacaaatgagtttgaatgcaggacaggtcttcaaagcatacacaacatgggcctacatatgtacaacaataataatttataagttactgtttggatggaaagtaaaagtacagaaaatttgttaaaggaaattaaaatggagatcatgtctcaataatctctgagcagacaaaattagttaggtctcataagtgatctcaacctcgcttgatttgcaaatacaaacaaaacttaaattatttcttgtagctgcatattgaaaaaagagaaatgaagctcaaccagtcagaagtagccaacaaccttatataaatagaaactgtccaacaaggtaaacagacaaacaaaaaacaataaaaaaagttgtgctaccaccaaatgatttctttgtttctacatttttcaaataaatacttgcttcttacactgtcaatgaagcactcaatatctttccgtctgatattttataatttatcaattgctcttactcaaataaacactttgcaatttcattgtgtctcaaattactttttagcagaataaactaggaataaatattacaaaaatatctacggaatatggaaaaaacatagaaagtttatgaaatatatgaatgtagacataagcaaatagacaatttgtatcatattcttaggcagaaaaactcaatattatcaacatcaattgtccttatagttatttataaattcaattttgttcctatactgataccattaaatattgcaagtacacgttactataaaatgttatatagatgaaaacacaaacaagaatagacaagaaaactctgaaaaaaaaaaaaaccactggcaagccctgtgtaaaatcttgattgattaaaaaactcatggatcactgaaactaaaaattcagaaataaaccaaagtgtctaagaaagtgtcatagtgcatcttggctgctataccaaaataccttagactgggtaaaggataaataagagaaatgtatttttcacagttatggagtctggaaagtgcaagatcaaggcagcagcaaatttcgtatatggtgagagccctattccccatagatggtaccatctcgcacatgggacaagggcattcccttcaacttcctttgaaagagcactgattccattcatgaagatgaagaactcttggcttcaccactttcccaaaggcctcacgcctaaaattatacacatgaatttgaaaggggacataaacattcaggccatagcaataaaaactacatgggtgatggcatcatttatacatgaggtgtaaaaatgtgatgttcttatcacaaaggaaataaatgatttattcttcatggcatatatcaaaatgaaggtccaatgaaaatattttttatgaagataaatctatatggcaaaaaattaagtattgataagtttaaccctacaggttgcatcaggattttcaaggtttccagggatgagcaaggccctggagtttcctcctgtgacattttcctgaaagttgctcatgctgttattcaatttgaaagtagataatattgtttgtttctcttccaatatttactaaattcaaaataatatagggctctttactcataattctcaaacaatcattcagtcagtggggctctgctgaggaagagcacagacacatccacacaagtataatgttcctcaaatagaggacttctccttgtgctggagccacctatgttgcactcgatcagaggctttcccaggatagcatttctctgcagccctacctcagtcttaaccctgaaaatcccactcagaaggcgacggatgaacacccaccctagcattctaatctaatggatcctctcttaacaatcccttccagggatctgggatctttcctggattcgtcggccacacacacctaggctcaaaaatttggacagaaactttgatcctcattggccctcctgccctgtcctaccagcttctctagaagtatgcttctctaattgctccttagagacactatctaagggtatcaacctgtgccaatataattgatctcataaagtgagaagggaaataggcaagagtccagctagcctagaagcagtgtctagggttccttacctgatttatgtctctgatttacctaaatattgacaaatacagattcacctctaggcagtagaaaaacagaaggagaaatcccagttcgtagaggaagaagaaaatgcaatcaatgctgtctagagtcccgcttaagctcagccacagggtactaagtctcttcaggaaaaagcaattgttgtccatcatctgaaaaactgtggcctggaaccatgggcaccgagagtgcacactgcccactagagttccatgcctacatcacggagagatagaatagtctcaaaggattcttaagagtaatgtggggaccaaaaggagatgaatccacagcctctgccttaccgtctgatctaactaatagtatttccagacctttctgtgggctgcaccaggggttgttcagaaagaaaaaaagttgttaatgtcccaccgtttcccgtagcttccgaggtctgtgttgttcataccccaggttccaggttgttctcccactacttccacagaatcagtgtgtctcattccggtacctataatctcatctttattctagtcgccctctacttttttctagacactttatctactagagccaggtaaaatagagacaagaatatttacataaaacttagctggaactaagttggagtcccataactgctactaggctgagatgcaactcagaggatacaaaagccaggcttgcctagaattgcagttatgggaaagaaagtcacatttcacccaggaattattagcacgaaattccaagtttgtgaaatagattcctagatgattcctagatcccccaaacatttcatccttatcttggaggcaatcaggaagagaaaataaaccatacctaatcaacaaattatctaaccagcatgtgtggaaaaggagggaacatcatagagttggcttgttttagtacgtgtggtgaaaaatgccgcgaagtcagagctcaattggtctcaaaagcctaaaagatggcacagattagcttcacgggacacatggtatggatggtgtcggcatactgttatgctgaagatgtcaagagtggtgactgatatctcaagaagtgggccaaaagtccacttctggttactctgcttggtatggtctaggaattcttcaaccatgagacaaataggtcaactttcaccagcaaccccaagtctggtttgcagtattagactctgcgttagacacagatttaggttcaatctgcagcttgattgttgtcactctctagaaaacaaacccttaccatggacttctagatgagtgatccagttagatcagcatctgagattgtctccagtttgcagcccaaaagatattcagacagtctacagtttccattgtagataaccaaacagatagaatatgtgccattatcccaaaccctgagttctgacctttgagaggagcaaccactcatgtcaggttctgtatggctggcacaggttaaacagccacagcagcccagtggacatcatgaggtttcaccttccctgactcatctatgaaccaggaccagtcatataggaaacactcagtaaattgggggccccacagagacagcatctttgcttcagaggatagaaggaggcataaaatttcaaccagctggggatgctctagccctctatgggtgaaactgagtttgtcaggagttctgcagcaagctcttagctgactttcaaatcagtgtaaccagtagtgtgtcactgagtccaaaagcccaaagaacacctctgggaggaggctagtcctttactagaggctccaaatgccaaaatcaagattttcttgacctcaggatgaattgatcaatgcaaatctccccaaatattttcactaaaccttaattggaaagtaagactccagattttttaactctcactaaacataaatatctgattttttcacctgagatctatgtatgtgtgttggagcatgcctttaccaatcagcataaagttacatctctccttgagcctctactttctacttgtgcagagtttaaaatgcagaggtgagagcttagggttttctgggtcttttgctaagcatgtacctgaccttgagcatccccaattccccatttccttcttgatcccaaagaccgttatcacagtcttaattcccagcagcttttcctcctagagctttttgacatgattattcttagacccaactgatatccttcgttcctggtagactgcgtagctcatttccatttaaatgcttttagaaatattaaactatggatttaagatttatctgctttttaaattaagtaatgctgctcttagccttccacaggacttgagggttataaaaaaaaaggaagaaaataattattttataccaatagtatgaaaaagagactgggaatgactatattaatagcagacaaaatagacttaaaaacttaaaagagacaataagacattatatagtcatagattgtccatttggcaggaagatagaaatagtttaaacccatacctaataataaaacattgagatatagaaagcataacttgacagaattaaaggggcaaaaaggcagttctaaaataatagttgaagatgttaatactccactctgagtaatgaatagaaaaatgagatagatgataaattaggaaatagagttcttgaataactcaatgaaccaaattgatctaacagatatatacaatatactccatccaacaaaagagactacacactcttctcaaatgcacatggggatttccccacgatgggctgtgtagtagatctcaaattaaatcaataacagaagaaacgttagaaagtttacaaaactgtataaattaaacaacatacccttaaacaacaaataagtaaaggaagaaatcacagaggaagttggaacatacttacagaggaagaaaaatgaaaacaaaacacatcaaaagttaagggaaacagcaaaaagagtgctaagatgtaaagtttgcagctaaaatgcatttaaaaagaacaaagatttcaaataaataataactttatcacctagtaaattagaaaaataacaccaaattagatgcaaagcaaagagaaagaagaaaatattaaagcttttagcagagataaatgcaatggagattatacaaaccacagaattccaaaaaaccaaaagttcattctcacttcttcaaaaaattaacaattggcaaactttcagctacacacacaaaaaattaacagcatattcacatactaaaatgagaaatgaaagtgggacattactactaattcaaagaattaaaatgtttaaaaaactgtactgtgaactatgataggatgataaattggaaaacgtagataaagtgggcagattcctaggtatacaagacttgattacaaagaaatacaaaatctgaatagatacaaaactactaaggaaatggaatcagtaattaaaagcctcttcataaagaaaagcccttattttgttggcttcactagtgatttagatcaagcatttatagaacaaaaatcctttccaaagtctaccaaaagcctgaagagagcagttccaaacttattccatgaagccaccattagctcataccgaagccagacaaagatactacaaaaacccatagactaatatcccttatgaacacggatgcaaaactagtcagcaacatcctagctaactacattcagcagcatactagcaagattacaacccatgaccaaggggagtttattattggaatgaaaggaagttttagcatatgggtggtttcagtgcagtggtgtttacaaataattgatcacaaccagtatagatttctttattctttttccagtctcactggttcacttagctagcctttcttaacaaaagtttaagcatatgaaaattaatcaatgcatatgccacattgacaaactttttaaaaagtattctctcattaatacagataacgtattttacaaaattcaaaatattttataataaaaacaataaattaggaataaaaggaaaccagctttgtaaaattcacatataaaaacccacagcaaacaacatattccagaggaaaagatcaaaagtgtttcctctaagctccgaagacagagtgaatatctgctcttgctagccacttttattcaacactgtattagaagtttcattcagagaaattaaaaaagacaatgaaataaactgcatcaaaatgtgtacagaaaatatattcttatatgtagaaaatctttaagattccaccaaaaaatattacaactaataaattcagctgaatagtagcatacaaaatcaacatacaaaaacaaactgcattttatgtagtaacatgaataatctgagaagaaaactctgaaaacaattcaatttacaatagtatcaaaagaataaagtagttaggaagtaacgaagaagtaaaatgccaattactcttgtgtagatattaaaaaatcaatttttaagtttatggggaatctcaaagatctttaaattgcaaaaataattttgaaaaaaataccaaagttagacaagtcacacttaatgatttcaagacttactacaaaattccaaaatagcatgctacaaagagactaatggagtaatatagaaggcccatataaataaaccctcatatataaggtcaaatgatttttatgggaaatgaactgcctttacaacaattagtgctggggaaattgggtgcccacatgtaaaagagtgaagctgggcccttaacttctactataagaaaaaattaactaactggatcaaagacctaaatgtaagagctaaaactacaaaattcttagtataaaatgtaggtaaaacacgtcataaggctggatttcgcagtgatttcttttaacaggacaccaaaaatgcaagaaacaaaagaaaaatagataaagaggactctatccagaatatacaaagaacaattcagcaataataaactacttgtttaaaatatgggcaaaatacttaaacagatatttctctaaaaattatgtgaagtggcttataagcccatgaaaaggtactcaacaaaaccttttcattttcattagtaaaatgaaaatctaaccccaaatgacatatcacttaatgcacatcagcataactagtacaaaaagaaaaaaaaaacagaaaatcacaagtgttggtgaggaagtggagcagttagaacccttgtacacttggtggaaatgtaaaatgctgcagctgctataaaacaacaccatagtaacgaaataatttacactcaaaatcaccgtatgatccagcaatttcacatcttggtatgttgcaaaagatgtgaaagcgaagacacaaaataatacacgtacacctaagctcatagcagcatgactcacatcactcaaaaggtttttgaattacctgtgttgtttgaattatcatcaatgaataaatagataaaatgtgatttatacatacagtgggatattattcagttatgaaaaataaggaaattctgacacatggtacgtcatgcatgaaccttaaggacattgtgcaaagtgacatgagccagtcataaaaggacaaatactgtatcattccacttatgagatacttagagtagttaaattctggaaacccacgtagaagagtggttcctaggagctggagggggagtaacagggagctgttatttaatgtgtattgaattttggtttggaagttgaaaaaagatccttatgaatgggaataatagttgcaaaacaatgtgagtgtagttaatttctctgagctgaacacttaaaatagttaagatggttaattttatgtatactttgccaaaatgtaaaaaatattttttaaataaacaaactatagctatctgcaatagcatgaattaatatcataaatataaagttgcctagaagaaagtagatgtaaaagtatacatattatataatttcacttatataaaatccagaaagtgaacacaactgaggttctggtttccagtaataatgaagtagactagttcgttgaataactatttcacagataacaataataaagcttaataaaatactatattttgctatatagaaaggcacactgtttagaagactgaatgaagattttatctatgccactgtggaagagataaggattggggtttgaatctattcaaattaactccctcttaaaataataattttcaaagaaatacaacagaatccagagtccctgtagttcctatcacacaatttaaaaattcatgagatgtgtgaagaagcatgaaagtgtaatcgattcacaagataaaaagcagacaatagaacctattctcaagatgtgcaagatgctgtaatcagtagataagatttgaaagaagctatggtaagtacgttcatgggggtaaaagaaaacagtctcatgacaagtgaacagaagcgtaactgtacatttcatgcgcgtccgtgtgaagagaccaccaaacaggctgtgtgtgagcaacatggctgtttatttcacctgggtgcacgcgggctgcgtccgaaaagagagtcagcgaagggagataagggtggagccgttttataggatttgggtaggtaaaggaaaattacagtcaaagggggtttgttctctggcgggcaggagtgggggtcgcaagatgctcagtgggggtgctttttgagccaggatgagccaggaaaaggactctcacaagataatgtcatcagttaaggcaaggaccggccatttacacttcttttatggtggaatgtcatcagttaaggtggggcagggcatattcacttattttgtgattcttcagttacttcaggccatctgggcgtatacgtgcaagtcacgggggatgcgatggcttggcttggtctcagaggcctgacatacactcccagtcttttggtcacagggctgtgggactgaggagggaaattaaagaaaaataaaattaaaaagaaagagaaataaattttcttgtattgggctgacttgtcccagaggcttcaacaggcacagcccagaaccaggaatagtcttgataatattatctaatgtgctctggaggctctcccaacgctcccccaacatcgggaaaagaaaaacaaatttcctttttttacggaatgagtttatagattcttgttctctgtaactagtgacttcaagtattctgttttatctaagaagtacaatgtaagtcatgagaagcctgagtaggctgaactacagctgtttgggcaccatagtgagggttataggataagcccatgcccagggaaacctagaaaatggacatgtgggttgcttggcaacggtcatgtgcaatcctgtctgtcctgcctctgtatccctgctttcacgccactgtaaacttgcttcaagctagcccaccaccttttgtgaaatgtgcataaaagtcaggttctgtctttgttccgggcccagtctttttgatgtgagttagcttgtcctcagtttcatgggggtccgtgtgaagagaccaccaaacaggcttcgtgtaagcaataaaagcttttaatcacctgggtgcaggcaggctgagtccgaaaagagagtcagcaaacgtagatagggatggggccattttataggatttgggtaggtaaaggaaaaagggggattgttctctggcgggcaggagtgggggggtcacaaggtactcagtcggggagcttttgagccaggatgagccaggagaaggaatttcacaagacaatgtcatcagttaaggcaggaacaggccattttcacttcttttgtggtggaatgtcatcagttaaaacaagaaccggccatctggatgtgtacgtgcaggtcacagaaggtacgatggcttagcttaggctcagaggcctgacactgagtgcactcaataaaaattctcctgtttcaacccggggtctctctcatcctcctgaatcccgcaacgggagaattccagcatgcaccaggttcacgggacagtgcgcggtcactgaaagaagagtggggcggggagggtggtgtgcggctgtgagcacctcttgtgcttgctgggagatgtagtcttataaagactcccagccctttggtcacagggctgcagcaccccaattccagcatacaccggaatcagagacagtgcgcgccggcagaggaagaggtagagctgtgcgtgactcgctgggcttgatggaaaatgtaatctcatgaacactccttaatgaacagtgcgcctcactggaggaaaaggcggggctgtgcaggccttgctttgcttgctgagagatgctgtctcataaacactcccagccctttggtcacagggctgcaggactacattcccatcatgcaccgggatcagggatagtgcatgtgcctgggtgaagagacacagttttgcgcgcctcctttggcttcctgggagatgtagtttcataaagacacccagacttttcattacagggcagcaggactacaatcccagtatgcaccaagatcaaggatagtgcgcgtaactgcagaatgaggcgggattgtgcacgcctcgctggacttggtgggatatgtattctcataaacatacccaaccctttggtcatagggcgggaagactacaatcccagcatgcacctggctaagagacagtgcctgtcactggaggaagaggcggaagactacaatcccagccagcaccgggctcagggaaattgtgcgtcagtggaggaagaggcggggttgtgtgctactcgccaggcttgctgggagttgtattctcataaaacctcccagccctttcatcacaggcctgaaggactacacttccagccccagcatgcactgggctcagggacagcgcgcgtcactggaggaagagggagggctttgcgcttctagctgtgattttttgggagatgtagtctcattaacgctcccagccctttggtcacagagatccaggactgcaatcccaacatgcacccagctcagggatagtgcgctaatcactgcaggaagaggcagggctgtgtgcacctcctgggcgtactgggagatgtattctcataaacactcccatccctttggtcataaggctgcaggactacaatcctagcatgcacccagctcagtgacagtgcgctagtctaaggagaaagaggcagggcagtgtgcgccttgctgggcttcctgggagatgtagtcccatggcctctccctgccctatggtcacagtgctataagactacaatcccagcatgcacggggctcagggagagtccacatcactgcagaaagaggggcaggttgtgcgcacctcgctgcgtttgctgggagatgttgtttcataaagactctcagaccttttgtcacagggctacaggactacaatcccaggatgcatcgggatcaaagcagtatgcgacacggggaaaagatgcggagctgtgtgcgtctccctaggtcttctgggagatgtggtctcttggccctttggtcacagggctgcaggactacaatgccagcatgcagcgggttcatggacagtgtgtatcactggaggaagacgtggagctgtgcgtgcctcgctgggcttgcagggagatgcagtctcataactaccccagtcgtttggtcgcagggctgcagcagtacaatttcagcatatctctggctcagggagagtgcactagtcactggaggaagaggtaggtctgtgcgcacctctctgggcttgctgggagaggtagtctcataaacactaccagccctttcatcacatcgctgtaggactacaattccagcatgcacggggcgccggggcagtccgcctcactggaggaagagaaaggcgtgtgagcgccttgctgggctttctgggagatgttgtctctttatttctcccagccctttggtcacagggcttcaggactacaatcccagcatgcatcctgctcagggacaacgcgcgtcactgtaggaagaggtggacctgtgctgttctcgctatgctttttgggatacgtattctcgtaaacactcccagccctttggtcactgggctgcatcactacaatcccagcatacatcgggatcagggagagtgcgctaatcagtggagaaaggggcgaggctctgcacacctcgctggtcttgctgggagatgcagtctcataaacactcccagccctttggtcactgggctgcagcgctacaatcctagcatggaccgggcgcagggaatgtgcgcgtcactggaggaagaggcagggttgtgcacgcctctctgggcttggtgggagttgcagtctcataaacactcccagacctctcatcaccgggctgcaggactacaatcccagcatgcacccggctcagggagagtgcgcattactggaggaaaagtctaggatgtggatgcctccttctgcttgctgggagatgtagtttcataaagactaccagaacttgtgtcacagggctgcaggactaccatcccattatgcactggggtcagggacacggcccgtcagtggagaaagaggcggggctgtgtgcgtctccctcggcttgctgggagatgtattcttataaacactcccagccctttggtcaaagggctacaggactacaatcccagcatgtgccagtctcgggggcgaggtacaggcctggaagaaggggccgagtggtacacgccctacctaatatgctgggagctgtagtctgttaactgctctcagcctgtttgtcggtaggcttcagaactataatcacagcatgtaccgggacccggggtgcatagccctggagggaggggcagagcggtgtggacttcccggtgtccaaagcactgctgagttcttatgctatgccgactctttgccaaggagaatgagtacataggtggacctagaggacaggtctgcgctgagcattgaggagggtattaccctacataggcaccttacctttgcccaaatcgggcgggttgtcctcaactgattggccctatccttctcaagttcctctttcagctgcacccagggttcttcccagagcattgcgccttctgcagcccagggcgctgccttctttcctaaactgctgtggaaactgtcctgatgtctgagacactgtccattgtgccgcagccctcttttttctctagccaagcctcatgctcaacagcttttgagagaaatcttccacgtggcctgcttatgaacagcttcagaattctgtagggggtgacaaggtctgtggcttcctggaaatgtcactgtcaatggcgcctttttcacgaatgtgaaagttgaggcatcaggaaggttaattattgggttgcacaaaatctgctaagagcaaaggagaaaaccccatttccgaggcatgagtcttgtgagccattttcatcaacccatttaagtggacaagctccaaaatgaaacctgaagctgctgactatttaggcattttacacttgaaatcatcggtctcatctcaagtcactcctgacttgccagtgtctcagaaacacaaatgggaccggatccctcaggagcagatagtgttccagctttgttggagcgacatttaagatgtggagcacttggggtcgtttgaaacccgctatcttcagtagggacttttacttctagagaacatgtgcattttgattttatctgtcctcaaactgaacttttgctcattttaatagtaaaaacacattcctaggtggagacttaagatgctaatgagacatgcaatgtatgcacaaatatgtacagttagtgcacatgtgcacccagaagaccactcaaaacatgcttacactaacacttctttccaccttcttatgaataatcgtgcaaaacccccagaaggagggtttctccagtaacaattaatggtgtctcactcttatgagcagcctgccctggaatctctttctcagaatgtaccgtctattctgcacttaattttcaaagtagtcttttctttttttgtgtgcaataaattactctatgctgtacttcttttgctgtgtgtttcttgtttgaattcttttaaactaagaaaataagaatcaaggtattacatcagccatcaacatttcttttgccatggcctggagagaggtctgtccgcttcactgatttcactttccctttacttgccgtgaatactgtggcacttccagactacctggttaactatcgctggttcttccagcactgtttcactaaagttctggggaaaccctgtccctttaggctttatgcatttcccagctccttgaaattgttcttcaacaggctttctttgctgaacaaaagatgcacagtcatggataggcccagtcatagggattgaatctgagcattgcaggtgttataattgggcatcataaatggcaaaccactgaattagggaaaggcttgtcagccagacatctgccccccagcgagcagtgggggtcatctcggcagggctggagatgtccagcgctggtgagagctaggacggtgcatggcaaatgcctatgacctcctagagcttcagttaatggggtttcaaggggatgagttggacaacttggtggttccacttggctcatggggctgcccacagcctcctggactttagtacatgttctgtcgtttgcaggattctctcggcaccatgggaatcacttcctctactgtcactgaaacacacctgggatgtatatttaaaaattgaaacagcttttggctaaatgaagcaaaaaaacaattatcttcttttgtaaaactatttagcctgcatacagattagctgacaaaacatggctggagaatgagactgtgaaatttaacaccatcatacagctagatcttttctgtagtaatcagggaaaatggtctgaagtatcctatgtgcaagactttctggcccgacaacaaaacccagctccatgcagcacctgtgggctaaagcctagtaagccacaaagcccctcagatccagtagaagatcatttgttttatggacaagtgaccccagaccccacagcctaataccagctccagataggggccctcagaggcctacacctgctttagaatccccagcgtccccacactatcagagtcttctgtagaatctaagcttgtttcacctcctccttatgctcctctatcagcctttgccagttacaatagagaccagtccagctgcagttactcacagtggagcttcacaccatgcagggccagagaatttgatccgcttacagaaagtctcaaatggagagaggaccatcagagtgcttcttctcttcccagtaaatgatctaatccaatgtaagcaacagctctgatggctctcagacaacttcagcgcgtttactgaagccttccagtctctaactttgaccaccattcaactttaccatccataaatggacccaatgactgctgccaactcagctgcacaaaactttttcttatttgcgaaaaatagaaaagacttaaaacttttgctgctttcaccattttaaagcagaatacttttgcagcacaaatgtcaccataaggtggagccttgggaatccagtataaactatctcagaaaatctcagtgtgtccccaacaggcagcagagggcctcaatagacttcaacaacatctggactccatggccactgcattccaacaaaatcaaagagcctgggatcttctcccagccaagcaaagaggaacatgtttatatctaaaagaagaatgctgttttttgagatcaatcattctggtttattccaagaaaatattaataatatcatcacccaggcagacaaaattgaatctctaggaacttccatgggaacatgaaagcaatgtccattgcctgccttgctctctttaatagtacccgtcattattatattttcaacttctacttttgttccaattttgtttaaaatgttaactgatttcctgctatgttgcttgtggcagctccatgtttgcatgatggtttgcaaggctttcaatctttggctgccaacatcttcccactggttccacgaatgacatggtttacaccctgttagatcacacaggaagaaactttaaggcccaggctaggcagaagtaacacccactcagcaggaaacagctccagaaaaagtggtctaacccctcaacctccaatatggttattgccctaaaatctcttagggggaaattgaggcagaatagatagtacagaaaatgaccatgatctcaggatacagaaaccatggtgactgtacagccaacacaataagccgtagcattcgcattgtaattgggcttattcgagcaaagctatcctcattaaggactttctgttctagagagcatgtgtattttgatttcacctgccctcaaacttaaattttgcttattttaatagcaaacaatgcaccccctagccaggcacggtggcttatacctctactctcagcactttgggaggctgaggaagatggatcacttcaaactagaagctcgagactaaactggccaacatagagaaaccccgtctaaattaaaaatacaaaaattagcagggtatgatggtgcatgcctgtaatcccagatactcaggaggcagaggcacgagcatggcttgaactcaggaggcagaggttgcagtgagcagagatcacaccactgcaccccagcttgggcaacacggcgagactctgtctcaaacaaacaaacaaacaaacacacagaaatacactcctgggtggaaatataagatgctaacgagacatgcaacatatgaacaagcatgtacagctactgcgcatatgcacccagaataccacagagaacatgtttactagcaactcctcttccctcctccttattaataataatgtaaaactgccataaaggggtttctccagcgacagtccacgctgtctcactcttatgagcagtcagccctggagtatctctctcagggtgtactgtattctgcacttaactttcaaatattttcttttccaataaattatgctgtactttttttctttgtgtctcttgtttaaattcttaaaatctaggaagacaagaacagaggtatcacatcagttgtcaacacagcaataagtcagcctccttcttgtaagcatagcccatgcagaaaaggagagtcgcatcacctcggtgctggatccagaggtatgtcacaatttatcccatgcacaaagttaaggtcattgaggagagtcgtattaaataatttctgggcccagggatttgtcacaacagctcctgtgagaagagatcaggcagcataatcacataaccggtgtgctggacacagcgataagccacctttcatctgtgggcatgacccaggcaagaaagaagagtcacggcatttaggtgcttgctgcagaggtacgtaacaatctctcttatgggcaaagctcaggtaagagagaagagtcaaatatccaaggtgattcatgtagaaatttgtcacaagagactttttaggcagggcccatgttggatcttcttatcttccagaagttaggtacagggatatgtcagaatacccaaaatacacagggctcagtcaataaagaagagccacatcacccaggtgctgggtctagacatatgtcacatctcttttatggggaaagctcaggtaaaaaaggaaggtcatatcaaatagttgatagacccagagatatgtcacattgcctcctgcttgaagtgtctaggccaaagactcacatcacattggtgctaggcctgtgttcatatataaacattcaaccagagttaaaatggtggcccacatctaaactcagctcataggcaagggatgagtctcctatcctgacatagttaattgtaatgatgttgactctcatccctgggcctaatgctacaagtatgatcatgggtccctaccattaggaaggtctcaaagttgattacgactctcatgcatactgtatagggccattgggtagtacacagagcgtgctaactgggccgagcacacaggtgagattgtcacactcatatgcacacccagccaacagtaactattgtcatcctctcacgggaacacaggtcagtctgcagaggaattgaggctgtcatgcgcaaatccagtctggtgttgagatggttactcttgggcttagacccaacatacaggaggtgttgaatgtcatgcctaccactgagacagctgtgggattgttaatctaattcctggaccattctgcagcttccattgtgaaatttcccagtgcctagcacctaagtgacttgacgggctcgcatggacccagcccacagatgggatattaacatattgctggatccagcacattgaggatgtaactctattctccttccttggcactgcccacagtgagcagtttgacatatcgctagaccttacacccaggtgatgtgagtctcctcttctgccttggcgctgccctcaggaagcgttgttatatatagcttggcctcgcatccaggttatgtgactctccggcttgtgcactgcccatatgggacactgtgttaatattgctgggtccactactcaggctatgtaacccaacagcctgggccctgccttacaggggcattgtgacatatctctgtgctcatcagccaggtgatgtgattctcttctcctgcctggtccctttacacagaagggattgtgacacgttgctgggcttagcaccaagttgatgttgatgtgaatcttctgcctggatcgagttcacagaaggcatcgtgacatacttctgggtgcatcacctatttgatgcaactctcctctcttaccagagcattgcccataagagagattgtgacatatccctgggtctagcactgggatgatgtgaattctccctgcctggggcatgcccacagaaggaagtgtgacttataactgggcacagcacaggggtgatgtgattcttctgcctggtccctacctacaggagtcattgtcaaatgtctctgggcccatcatctagactatgtgactctctacttcttcctagggcctgctcacataaggattgtgacatattacatgcccttcatcatgtgacttttctctcatgtctgggctctgtcttggagatgaatgtgacacatagctaggcctagcccctaggttctgtaacttctcgtttttcaaaatcctacccaccaggggcattgaaacatctctctgggcacttcacttaggtaatgttgccctgttgcctggagcctcccctctggggggtatggtgacatattgctggacacagtacctatgtgatattctctcctttcttgcctgggccttgtatacattatgtattctaatatatggctgggttcaatgactaggtgatgcaactcttatgcatagaccctacccacagggacattatgacatttctttagctctgactctcctctttttccttagccctgccaaaaagggaggtggtgacatataactggacctagcaaccagctaatatgagtctcctcttttgcctgcacccagcatattttaggtgttgtatcatatcctttgtctcaacacctgcaggatgaaaggctcctgcctgagcccagccatctgtcaaaattgtcattctcccacacgaacatggaccataattgaggttctgaaactcacacccagaggcagtcaaaagttggaaaattggctcttaaaagtggatgttgtccttaagtgggtttgtgactccctgaccaagatccaaaacacttgtgaggctgtgaatccactaagataactccgttttcaaaagggattaaggctctcatggaaaaaacccattcctccattgagattgtgacttatgcacatagatgcaacatacaggaggcgttcactctcatacccagaaccggaacttatgtgggattgttaatctcatccatggaccttcctgcaggtgtgattctgacgtacacctctagccagctcctgagtgatttgacatttttgcctgggtgtagcccacagatgagattgtgatatatccttgaatccagcatctaattaatatgcttctattctcctgtcttggcactgcccataatgggtatcctgacctaacactggtcctggcactttgttatgtgactctgtcctgtgctttgcccacatgagccattgtgacatattgctgggtccaacacccaggtgatgtaactcttgtctagactttgcctacagggggcattgtgacatatctctacactgaccacccaggtgatggcactcacttctcctgactgctacctgtttatagcagggattgttacaaatcgttgcgggcagactctaggtaatgtgactgtctttttacagagtgctacccacaggagccattgcaaaatatctgtgggcctctcacctaaatgtagtgactctttgcctgggctcatttctcaggggtattgtgacatatggctgacctcagcaccgaggtgaactgagtttcttctactgtagggctctgaccaaagagagattacaatgtatcaccgggcccagcacctgagctatttgactgtccgctcttggctgcgccctacatttattgtgtattgtgacatatcactgggtccaacacgtaggtaaggtgactcacctgcatgggccatttccccatgggtactatgaagtattttttgttcatcacttaggtgatgcaactctcctctttgccttgggccccacataatttagctattgtgatgtatcactgtgcgaatcacctagtcaataggaagcttctaccaagaccctgactactgagggccttgtgacatagctctgcatttatcacctagaaaatatgatccccccccatttctgcctgaaccctgctcacaagaaaaattgtagcatatttctgggcccagcaaacaggtgatgtgtttcacctgcctgtgcttagttcacagggaaaattgtgacatatcactgggcccagaacccaggtgaggtgactctgctgcatgtgtcgtgctttcaggagggaacaagaacatatccctggcagaactcttagggatgtgactctcttgccttgtccctgtcctcagggaagactgcaacatgtccctgacacagacccaggtgatgagactgtcctgcttctgactacccaaatgtgagattgtcacatatattttggcttagcatgtaggtgtgacgatgacattcataccttaaaccaaccaatagcagagatactttctctcacagccaggcttaacaaaacttgcaaaattatgggtcttctcttactatgaaggtcagagaaagtaagcactcttgcatatcctgtaaagcactcagatggtacagtgtcatcacagggcccagaacacaggtgagattgtgttctctgtgtgcacacccaccaatcatcagaattctcattcctacacaggaacagaggtgattagggaggtctaaacctcatacctgaatgccgtccacagttggaattgtaactatcatttgtgaacatccagtcacagtggggatagtgacttatttctgaacccagtttacagccaagtaaagatcctcttatctggatccagccagctggagagatgttgactctcatacctggacttatggccacaggtatgatcataggttcatatcagcatgaagacctcagagtggattatgtttaatgcatactctacaaggcccacaggaggtacatagtgtcctaacagggcccagcaaacaggtgagattctaacactcatgcacactctggtgacaataaaagttgccatcctcaaaaatgggcacaaccggcgtggctcagtggctcacacctgtaatcgcagcactttgggaagccgaggcggacagatcatgagatcaggagatcaagaccatcctggccaacatggtgaaaccacgtctctctactatttatgattatgattatgattatgattatgattatgattatgattattattttgagacagagtcttgctctgtcacccagactggagtgcagtggcaccatctaggcttactgcaacatccgcctcccgggttcaaacaattctcttgtttcagcttcccgagtagcagggagtacaggctcatgccaccattcccagctaatttttgtgtttttagtggagacggggtttcaccatattgattaggctggtctcaaactcctgacctcaggtgatccacccaactcgacctcccaaagtgctgggattacaggcatgggacactgtgcctgtccaccccatctctactaaaaatacaaaaattagctgagcgtcatggcacatacctgcaatcccagctactcgggaagctgaggcaagagagttgcttgaacccaggaggcagaggtttcagagagccgagatcgccccactgcactccagcctggcgatagagtgagactccgtctcaagggaccgaaagaagaaagaaagaaagaaagaaagaaagaaagaaagaaagaaagaaagaaagaaagaaagaaagagagagagagagaaagaaagaaagaaaggaaggaaggaaggaaggaaggaaggaaggaaggaaaagaaagaaagaaagaaagagaaagaaagaaaggaaaagaaagaatgaaagaagaaagaaagagaaagaaggaaggaaggaagaaagaaagaaaaagaaagaaagaaagaagaaagaaagaaaaaagaaagaaagaaagaaagaaagaaagaaagaaagaaagaaagaaagaaagaaagaaagagaaaattgactctcatatatggatcttgtccacaggtaggtgggtgactctcaaaccaaaattcattacatctgtgagactgtaactctcctaaggggagaagttcttctcagccagagaagactcatttatgaatccagttcactgttgagattgggactgttgtacctaggccaaacatacaaattctcatacctggaatccggacatgtgtggagttgttcatctcatccctgtcgctttctgcaggtgggattgtgacatacatctctgcccagctcctgagtgttttagctctgtttcctgtgtccagctcacagatgggattctgatatatcactgaagccagcacctaaatgatgtgactcttatctcctgccttggtgctgcccacaggggacattgggacatatcacttggccttgcacctaggtaatgtatgttttctgccttgcattagtgctactcacaggggtgttgtgatgtattgctgggtcccacatccatgttatgtgactcttctgcctgtgcccagtccacaatggccattttgacatattgttgcatccaaaacctagatgatttacctctccttcctgagctttgcctaaggggacattgtgaaatatctatgagcccatcacccatgtggcgtgattttcttctcctgcctagtccctgcttaaagaaaggattgtgacatatcactgtgcccagcacctatctcatgttactcttcttttgttttttaggatttgtttggaaggagattgtgatacattggtgggtccaacttctcagtgacattactctgttgactgtgctctgcaagcagaaagcactgtgacacattattgggcccaacaccaaggtgagtctcctgcctgaagcctgcctacagcaatttgtaacatatggcattgggacatatctctgagcccatcaactatttgacaagattctccttttttaacaaaggctttgcccataggagagattgtgacataattctgagccctgaaaataggggatatttcttttgttttctgcttgagccccacattgtgatgtatttctcctcccaacaactgagggaagggaaagtcctgcctgggtcttgcctatggggagccttgtgaaatctttccgtgttcatcaccttaaatatgtgaccctcatcttctgccatggccatgtttacagaagggagagtgggttattcctagacccagcacacaggtcatgtgattctgcatcctggtgtctccagaggggtcattttgacatatctctagactcatcaactagataatgtaatgctcctcttccccctgaaacctatccatagtggagattgtgaaatacagcctggcacagcacctacatgatggtactctcttctcatgcttgggtgctggccacaggggtgattaagacttatagctgggtacagtcttcaggtgatgtaactctcctctatttttgggcccacacacacagggaactaccatatagctctgctcctcagtcttaggtgatgtgactctgctgtctgttacctcctcttagggggaattgtgatatattgctgggcccagaaccgaggtgatgtggccttttctcttgcctgggccctgcatacatggtgtacagtaacatatatctgggttgaacacataggtgatgtgactcttctgcataggtcttgccaacaggggtattatgacatactcttctattcattgcctaggcgatgtgactctccactcttacctgggcccttccaaaagaggggattgtgacatatcactgaccctaacaccaaggtaatgtgactgttctcttttgcctgggtttgcatattttgggtattgtgacatatccctgggcccaacacttagggaataagaggtttattcctctaccttacgtgcagtgaagcttgtgacatatttctgcattcatcaccaagaagatgtgactcttctgcctgcatcctgaccacagagaggattgtgaaatattgctagatccagcatgcaggtgatgtgtctctgctgcctcgttcctaatgtgaggagtggattgcaacataccaatgcctgaacattcaggtaatgtgactgttgactggtccctgtcctcagggaagcgacatatcactgacccagcatccaactgattttactctcctgctctcttcctatatgcaggtgtaattgttacatatatcttggaacacaacacacaggtgcaatgatgacattcatatgtcaaaccagccaatagaagagatactgcttctcctagctacacttagggaaatgaaaaaaaaccctgggtctcctcgctaagatcatccactctctcatatattacagaaagtcctcaggtggtagagagtcttatcacagggcccagcacacaggtgaaatttgttactcctatgcgcaccctgaaccctcctgaccattatgattttcaccctcacatataaacagaacccactggtgaggtcctgaatttcacacatgaatgcagtttatagttggaattgcgaatctcatatgtaaagatctggccagagttggaatgggaacttcgttataaacccagcgcatagaaagctgatgactctcttatctggaccccgccaattgtaaagatgttgactcatatataggcttagggccacaggtttgatcatgggtccataccagcatgaaaatctctgaaagaattgagactgtcatgcatacaacataaagccgtcaggtgcaacacagaaagtcctaatagggctcagcacacagtaatataatgacattgggatgcacacccagccaacattaaagattgtcgttctttcacatgatcatagttcacttttgaggctctgaatcccatacccaaaggcagattgaaaagttgaaaaattgactctcatatttgagagtcacagatgtgttgatgactctcagatcatgagtcagcacacctaggaagctgtgatttcaattaggggacaaagtacgcaagagaaaatggggctgccatgcacaaatttagtccactattgagatagtgacttgtgtacttagatcaaacatacagaaggtgttcactctcatgcataaaaccagaatatgtgcgggattcatcccatatctggactttcctgcaggtgtcattgtgacaagcatacacatttgtccagcacctgagtgattagactcttctgtttaagcccagctcacaaataaaattgggacatatcattggacctagaacataggtgatgtggctctattctcttgacttcgtgctgcccacagggagcattgtaacgtatcactgaacttaacacctaggagattagaggctcctgcctgaactctgtccacagtgagccttgtagcatatttctgcttccaacaccagatgatgtgactctcctttctgcctgcaccttgcccacaggaaagattctgacatatcactgggcccagtaatcagtaatcaggtgatgtttctctcctgctatggccttgcccacagggagtgtggtgacatatcactgagctcaatattcaggtgatttgactctgctgcttgtactctgatttcaggaggggattgtaacatatcccctgtgagcacacaagtgatgggactcccctcctagcctctgacctcagaaaacattgttacatatccctggcccagccttaggtatgtgactctcctacctgttccctgccatcagggaagatattgacagatctcaggccaagcatcccggtgacgtgactctcctgctcactcccttcccacagaagagattgaaacatatatcttggccagctcacaggtgtaataatgactctcatacctcaaacctgccactaagagaaatactgtttttcatagggaggctttggaaaaccggtaggtcttaactcttcgttttgtatgaaggtcttagaggaatacaactctctcatattatataaagctcttaaatggtacaaagagtgttatcacagggatatgttgcataacctatgggaggggcccagttatatgtcacaattaacccagggggcagggcacaggcatgaaaagagagtcacaccacatatgtgctggcctaagtgatacatcatcatccccactgtggacaggtcgcagtaagaacaggagagtcacatcattctaataatggtctcagagatacatcacaatgactcccctgggcagaaacaagggataaggttcacatcacctgtgggctaggcccagagatgtcactcttacttctgtgggcatgtctcaggctggagaggagaatcacattacctaagcactggaccaagaaatacttcacaatctttctcatggcgaaagcccaggtaagagaatagagccatatcaaatagttcatgggctcagagatatgtcacaatgctccctgtgggcagggttcaggtaggacaatcacattaccttggtgcttgttcagcaatatatcccaaagccttctgagggcagagccaagataaaagagtaaaatcattttggtgttttacaaatcgatatgtcacaatctcccccgagggcagaacctgaaaaaagggaagagtcacattagctaaatgctgcgccgggtgataagtcacaattcaccctgtaggcagagactagacagaagatagagtcacatcatctagtggctggtgcagagatatgccaccatgccctctctaggcagagttcagacaggagagttatgtcacctgtgttttggacccagaaatatgtcacaaaagcccatggacagagcacaggaaagacaggcacataacctgaatatcagcttcagtggtatgacccaatgcctcctgtgagcgttccaaggcaggagaggagactcacattacctgtgtgcaaggcccagtgatacgtcacacggaggagtaccactgtcttgcatattgtgtaaactatggtagagaaattgtcaccacagggctcgccacactggtgagattatacttctcagatgcacaccacaccaatattcaggatggtctctatcacacgtggagagagcccactcttgaggtcctgaattacacatgcagacacagtccacaactgggattgtgactttcatatgtgaacatccagccacaggtgggatggtgactcatttttaaacgcagctcataggcagttaagaactcttatttggacccatccaagtagaaagatgttgactgtcataccagggcttaaagctaaaggtacaaggaggggtccgtgcctgcttaaggtttcagagagaattgttacactcatgcatactctataaaggctgcatatggtgaagagagtgtcctgacagggcccagaacaaaagtagattgtgacactcatatctacgctgagccaagagtaaaaattgtcatcttttcacatgaacacagcccattgttgaggttccaaatctcacacctggaggcggttgagagatgaataattgactctcataagtggatgcgatccatgtttgagtcagtgactctaaaaccaacattcagcaaacacgtgaggctgtgactccattaaggggccacggtcctcgggaaagactgaagctgccatgcacagatccagtgcaccattgagactgtgacttctacacttagacccaacaaacacaatgtgtttgctctcacacctagatatgggacatgtgcaggattgtcagtctcagccctggactttcctggaggtataactgtgaaatatatctcggcccagctcgtgagtgacttgactcttctgcgtagcccagcccatgataaaattgtgacattattgaacccagcacctatgacccccctcttctgcctgggtcctgtcaaaaagagagattgtaacaaatcactgggacaagcacccacatgatgtgactctcctcttttccctgggccctgcatattttgtatattgtgacatactgctgggcataatacctagggaattgatggctactgcctgagccctgttcacagggggccttgggacatctctctgcattcaccacctaaaaaaagtgtgtgcaccctgcctacaaagaagattgtagcagatcacttgtcttagcaaccaagtgatgcgagtctcctgtcctgccttggtgctgctcacaggggacattataacatatacttggtgctgcacccatgttttgtaatttttctgccaggggtctaccatataagctatattgctgggtccaacacccaggttatgcagctctcctttctgtgctctgcctacaggggacattgtgacttatctctgcacccatcactcaggtgatgtgacttgcttctgctgactgattcctgttcaagtggagattgtgacatatcaatggtggcaccatctagctgatgtaactattctcttctgcctaggttcttcctgcagtggaaattgtgatgtatcactgggcttaacaccaaagtgacattaattttttgccttggttcttccctcagaagacattgtaatatattgctgggctcagcaccaaaacgatgtggatttcctgtctggaccctgcatacaggagtccctgtgacatatctcttgactcatcaactatttgatgtgactctcctctgttccctgagctttgcctataggaaagcgtcagcctggactccagagtcagccacccacccctgcacagacaaggagaggtctcattaagcttcagcacagtctgggaccatagctttttttgtaacgatttgttcggcatgaggcccactcacaagggcccttcgtgactggactcaaggaaaacgaaaaggcctacttgtttttgcgattttctgttgtttttcaataactatttctcagaaacagtgctggatgaattccacaaggggttcacacaacctgttccaggacttagtgaccattgtttctgtccatgttcattgagttcaaatttaatatttaacttttcctcctcattcagcctcaatttgacactgaatcataggaaaatatttttacagttatacggggaagtcacaactggtatagattacagatagagcagaggagaattaaaagcacaattaatagaaaccacacccaccacggccaacgccaatgctagtttgacagccagtccatgatggggtcctgatggttagattctaactgttttacttgtccttgcatgtcttcggcaaggagagtaatactgcgagaactgtcagggatacacacaacattcagaatgcagcaagactcaaacccctccttgggctgcggtaaacatacctaatgccattcgattttgcaacacaacagtacacagctgaacaagttcttctgataacaacagaagtccagtgctactatcttaggagcttttactatatgtggacttaatattttaatttgttgctgaagcaggattgtacgaggggcaagggagaatactgtgatagttttccaccaccagggagtctggcacgttcataaccagctacctttgtaagcatctagattattggggaagggaatattatcccggatggtgaatggaattaatggcacccccaagtgaatctccccatccaataagggggcagataggccacccatagggtctgcatacccagagggccccccaggggacagcaatggttatactacaattatagtgtattaagatgttattaaagtagcaaaggaagtccaggttggattgcaagtgttgttgttttggccccatttgtagtgacagagccattcagaaatattggcaaggacaactctgcaaggcagtccatttcctgtggcctctggcaatttgatgcatagccagcattgactgcggttagcttctgtcgcagtggttgctgcccagttgatgaattcactctccacctcagacctgatgacccaggtactgattactagtagacaggttattctctgtaacaacaaaactgaaggggaacataatattgtttttcatttttaggaaactgtactacccttttattttctgctcccatacctacaaggtcacagccttaggggcgggatctgatggaggctgtatccatattttcgttccaggatttaagctacctataccagtggatcttaatttcccagttctgtacgtagcctctgttggggcagagatttcctcaggggttaattgttaacaaggtaccaggtaccactgacaattgagcaacccgaatctgcggtcttgtaacaaaagaatgtggagtggtattgtgtaaagtgaactttaactgttcctggtaatcattatcaattataccaccatacattataatgtgtctcatcgccaggcttgaatgtgttgtaatccattcacccacattcaagtttgcatttatgctggaaattttggcctgttgatctacctgctgtttagtctgtcaagagaatgcagagatgcatgagaatcaatatgaaaaacagcaataatagtaatgtgcatcaggattcaggtatcttcctagtattgttttctccaaacctctttattcattattcactatttgtttcattgccattcgggcaactaggtagtaagaccattttctgctgaccaacagtcggtatacaagcaacaaattgctctggcctcctcctgaatagttcggaggatggcttctagttcagccagctggctgctcacacccctcccttcatcagaaacgcttatgtttttaacaggattataagccacggcctcccagcatcaggtcccatcaatgtatttggtggaactatcagtaaccaagcgtgtttctgatcctctgggcttagttctttaaaggatttgccccattgggcaggggaggtttccttccctatatgcaggacttgccctgtggtttcctgagttggcaagttttgcacatcttcaagtaaaaatgataccgcttttagttctggcttatcctggtcttgtatgtaccatttccattttatgatactacattcttgagtgtaccctatccaatgggttttgagggagctcatgacccaagtcataataggaatttggggcctcataaaaacatcatgattaaaacaaaggtgttctgcttccttcaagcgcagtagaaggccaacagctgcttctcaaagagtataagctttgccagcctctggcagcttctgggtctaaaactccaaaggtatcttcttcccatcttgtttctacctaaggctccaattagcatgttgatgtaggacagttacttgcagttctgttgactcatcctataagggccatagatcnnnnnnnnnnnnnnnnnnnnnnnnnnnnnnnnnnnnnnnnnnnnnnnnnnnnnnnnnnnnnnnnnnnnnnnnnnnnnnnnnnnnnnnnnnnnnnnnnnnnnnnnnnnnnnnnnnnnnnnnnnnnnnnnnnnnnnnnnnnnnnnnnnnnnnnnnnnnnnnnnnnnnnnnnnnnnnnnnnnnnnnnnnnnnnnnnnnnnnnnnnnnnnnnnnnnnnnnnnnnnnnnnnnnnnnnnnnnnnnnnnnnnnnnnnnnnnnnnnnnnnnnnnnnnnnnnnnnnnnnnnnnnnnnnnnnnnnnnnnnnnnnnnnnnnnnnnnnnnnnnnnnnnnnnnnnnnnnnnnnnnnnnnnnnnnnnnnnnnnnnnnnnnnnnnnnnnnnnnnnnnnnnnnnnnnnnnnnnnnnnnnnnnnnnnnnnnnnnnnnnnnnnnnnnnnnnnnnnnnnnnnnnnnnnnnnnnnnnnnnnnnnnnnnnnnnnnnnnnnnnnnnnnnnnnnnnnnnnnnnnnnnnnnnnnnnnnnnnnnnnnnnnnnnnnnnnnnnnnnnnnnnnnnnnnnnnnnnnnnnnnnnnnnnnnnnnnnnnnnnnnnnnnnnnnnnnnnnnnnnnnnnnnnnnnnnnnnnnnnnnnnnnnnnnnnnnnnnnnnnnnnnnnnnnnnnnnnnnnnnnnnnnnnnnnnnnnnnnnnnnnnnnnnnnnnnnnnnnnnnnnnnnnnnnnnnnnnnnnnnnnnnnnnnnnnnnnnnnnnnnnnnnnnnnnnnnnnnnnnnnnnnnnnnnnnnnnnnnnnnnnnnnnnnnnnnnnnnnnnnnnnnnnnnnnnnnnnnnnnnnnnnnnnnnnnnnnnnnnnnnnnnnnnnnnnnnnnnnnnnnnnnnnnnnnnnnnnnnnnnnnnnnnnnnnnnnnnnnnnnnnnnnnnnnnnnnnnnnnnnnnnnnnnnnnnnnnnnnnnnnnnnnnnnnnnnnnnnnnnnnnnnnnnnnnnnnnnnnnnnnnnnnnnnnnnnnnnnnnnnnnnnnnnnnnnnnnnnnnnnnnnnnnnnnnnnnnnnnnnnnnnnnnnnnnnnnnnnnnnnnnnnnnnnnnnnnnnnnnnnnnnnnnnnnnnnnnnnnnnnnnnnnnnnnnnnnnnnnnnnnnnnnnnnnnnnnnnnnnnnnnnnnnnnnnnnnnnnnnnnnnnnnnnnnnnnnnnnnnnnnnnnnnnnnnnnnnnnnnnnnnnnnnnnnnnnnnnnnnnnnnnnnnnnnnnnnnnnnnnnnnnnnnnnnnnnnnnnnnnnnnnnnnnnnnnnnnnnnnnnnnnnnnnnnnnnnnnnnnnnnnnnnnnnnnnnnnnnnnnnnnnnnnnnnnnnnnnnnnnnnnnnnnnnnnnnnnnnnnnnnnnnnnnnnnnnnnnnnnnnnnnnnnnnnnnnnnnnnnnnnnnnnnnnnnnnnnnnnnnnnnnnnnnnnnnnnnnnnnnnnnnnnnnnnnnnnnnnnnnnnnnnnnnnnnnnnnnnnnnnnnnnnnnnnnnnnnnnnnnnnnnnnnnnnnnnnnnnnnnnnnnnnnnnnnnnnnnnnnnnnnnnnnnnnnnnnnnnnnnnnnnnnnnnnnnnnnnnnnnnnnnnnnnnnnnnnnnnnnnnnnnnnnnnnnnnnnnnnnnnnnnnnnnnnnnnnnnnnnnnnnnnnnnnnnnnnnnnnnnnnnnnnnnnnnnnnnnnnnnnnnnnnnnnnnnnnnnnnnnnnnnnnnnnnnnnnnnnnnnnnnnnnnnnnnnnnnnnnnnnnnnnnnnnnnnnnnnnnnnnnnnnnnnnnnnnnnnnnnnnnnnnnnnnnnnnnnnnnnnnnnnnnnnnnnnnnnnnnnnnnnnnnnnnnnnnnnnnnnnnnnnnnnnnnnnnnnnnnnnnnnnnnnnnnnnnnnnnnnnnnnnnnnnnnnnnnnnnnnnnnnnnnnnnnnnnnnnnnnnnnnnnnnnnnnnnnnnnnnnnnnnnnnnnnnnnnnnnnnnnnnnnnnnnnnnnnnnnnnnnnnnnnnnnnnnnnnnnnnnnnnnnnnnnnnnnnnnnnnnnnnnnnnnnnnnnnnnnnnnnnnnnnnnnnnnnnnnnnnnnnnnnnnnnnnnnnnnnnnnnnnnnnnnnnnnnnnnnnnnnnnnnnnnnnnnnnnnnnnnnnnnnnnnnnnnnnnnnnnnnnnnnnnnnnnnnnnnnnnnnnnnnnnnnnnnnnnnnnnnnnnnnnnnnnnnnnnnnnnnnnnnnnnnnnnnnnnnnnnnnnnnnnnnnnnnnnnnnnnnnnnnnnnnnnnnnnnnnnnnnnnnnnnnnnnnnnnnnnnnnnnnnnnnnnnnnnnnnnnnnnnnnnnnnnnnnnnnnnnnnnnnnnnnnnnnnnnnnnnnnnnnnnnnnnnnnnnnnnnnnnnnnnnnnnnnnnnnnnnnnnnnnnnnnnnnnnnnnnnnnnnnnnnnnnnnnnnnnnnnnnnnnnnnnnnnnnnnnnnnnnnnnnnnnnnnnnnnnnnnnnnnnnnnnnnnnnnnnnnnnnnnnnnnnnnnnnnnnnnnnnnnnnnnnnnnnnnnnnnnnnnnnnnnnnnnnnnnnnnnnnnnnnnnnnnnnnnnnnnnnnnnnnnnnnnnnnnnnnnnnnnnnnnnnnnnnnnnnnnnnnnnnnnnnnnnnnnnnnnnnnnnnnnnnnnnnnnnnnnnnnnnnnnnnnnnnnnnnnnnnnnnnnnnnnnnnnnnnnnnnnnnnnnnnnnnnnnnnnnnnnnnnnnnnnnnnnnnnnnnnnnnnnnnnnnnnnnnnnnnnnnnnnnnnnnnnnnnnnnnnnnnnnnnnnnnnnnnnnnnnnnnnnnnnnnnnnnnnnnnnnnnnnnnnnnnnnnnnnnnnnnnnnnnnnnnnnnnnnnnnnnnnnnnnnnnnnnnnnnnnnnnnnnnnnnnnnnnnnnnnnnnnnnnnnnnnnnnnnnnnnnnnnnnnnnnnnnnnnnnnnnnnnnnnnnnnnnnnnnnnnnnnnnnnnnnnnnnnnnnnnnnnnnnnnnnnnnnnnnnnnnnnnnnnnnnnnnnnnnnnnnnnnnnnnnnnnnnnnnnnnnnnnnnnnnnnnnnnnnnnnnnnnnnnnnnnnnnnnnnnnnnnnnnnnnnnnnnnnnnnnnnnnnnnnnnnnnnnnnnnnnnnnnnnnnnnnnnnnnnnnnnnnnnnnnnnnnnnnnnnnnnnnnnnnnnnnnnnnnnnnnnnnnnnnnnnnnnnnnnnnnnnnnnnnnnnnnnnnnnnnnnnnnnnnnnnnnnnnnnnnnnnnnnnnnnnnnnnnnnnnnnnnnnnnnnnnnnnnnnnnnnnnnnnnnnnnnnnnnnnnnnnnnnnnnnnnnnnnnnnnnnnnnnnnnnnnnnnnnnnnnnnnnnnnnnnnnnnnnnnnnnnnnnnnnnnnnnnnnnnnnnnnnnnnnnnnnnnnnnnnnnnnnnnnnnnnnnnnnnnnnnnnnnnnnnnnnnnnnnnnnnnnnnnnnnnnnnnnnnnnnnnnnnnnnnnnnnnnnnnnnnnnnnnnnnnnnnnnnnnnnnnnnnnnnnnnnnnnnnnnnnnnnnnnnnnnnnnnnnnnnnnnnnnnnnnnnnnnnnnnnnnnnnnnnnnnnnnnnnnnnnnnnnnnnnnnnnnnnnnnnnnnnnnnnnnnnnnnnnnnnnnnnnnnnnnnnnnnnnnnnnnnnnnnnnnnnnnnnnnnnnnnnnnnnnnnnnnnnnnnnnnnnnnnnnnnnnnnnnnnnnnnnnnnnnnnnnnnnnnnnnnnnnnnnnnnnnnnnnnnnnnnnnnnnnnnnnnnnnnnnnnnnnnnnnnnnnnnnnnnnnnnnnnnnnnnnnnnnnnnnnnnnnnnnnnnnnnnnnnnnnnnnnnnnnnnnnnnnnnnnnnnnnnnnnnnnnnnnnnnnnnnnnnnnnnnnnnnnnnnnnnnnnnnnnnnnnnnnnnnnnnnnnnnnnnnnnnnnnnnnnnnnnnnnnnnnnnnnnnnnnnnnnnnnnnnnnnnnnnnnnnnnnnnnnnnnnnnnnnnnnnnnnnnnnnnnnnnnnnnnnnnnnnnnnnnnnnnnnnnnnnnnnnnnnnnnnnnnnnnnnnnnnnnnnnnnnnnnnnnnnnnnnnnnnnnnnnnnnnnnnnnnnnnnnnnnnnnnnnnnnnnnnnnnnnnnnnnnnnnnnnnnnnnnnnnnnnnnnnnnnnnnnnnnnnnnnnnnnnnnnnnnnnnnnnnnnnnnnnnnnnnnnnnnnnnnnnnnnnnnnnnnnnnnnnnnnnnnnnnnnnnnnnnnnnnnnnnnnnnnnnnnnnnnnnnnnnnnnnnnnnnnnnnnnnnnnnnnnnnnnnnnnnnnnnnnnnnnnnnnnnnnnnnnnnnnnnnnnnnnnnnnnnnnnnnnnnnnnnnnnnnnnnnnnnnnnnnnnnnnnnnnnnnnnnnnnnnnnnnnnnnnnnnnnnnnnnnnnnnnnnnnnnnnnnnnnnnnnnnnnnnnnnnnnnnnnnnnnnnnnnnnnnnnnnnnnnnnnnnnnnnnnnnnnnnnnnnnnnnnnnnnnnnnnnnnnnnnnnnnnnnnnnnnnnnnnnnnnnnnnnnnnnnnnnnnnnnnnnnnnnnnnnnnnnnnnnnnnnnnnnnnnnnnnnnnnnnnnnnnnnnnnnnnnnnnnnnnnnnnnnnnnnnnnnnnnnnnnnnnnnnnnnnnnnnnnnnnnnnnnnnnnnnnnnnnnnnnnnnnnnnnnnnnnnnnnnnnnnnnnnnnnnnnnnnnnnnnnnnnnnnnnnnnnnnnnnnnnnnnnnnnnnnnnnnnnnnnnnnnnnnnnnnnnnnnnnnnnnnnnnnnnnnnnnnnnnnnnnnnnnnnnnnnnnnnnnnnnnnnnnnnnnnnnnnnnnnnnnnnnnnnnnnnnnnnnnnnnnnnnnnnnnnnnnnnnnnnnnnnnnnnnnnnnnnnnnnnnnnnnnnnnnnnnnnnnnnnnnnnnnnnnnnnnnnnnnnnnnnnnnnnnnnnnnnnnnnnnnnnnnnnnnnnnnnnnnnnnnnnnnnnnnnnnnnnnnnnnnnnnnnnnnnnnnnnnnnnnnnnnnnnnnnnnnnnnnnnnnnnnnnnnnnnnnnnnnnnnnnnnnnnnnnnnnnnnnnnnnnnnnnnnnnnnnnnnnnnnnnnnnnnnnnnnnnnnnnnnnnnnnnnnnnnnnnnnnnnnnnnnnnnnnnnnnnnnnnnnnnnnnnnnnnnnnnnnnnnnnnnnnnnnnnnnnnnnnnnnnnnnnnnnnnnnnnnnnnnnnnnnnnnnnnnnnnnnnnnnnnnnnnnnnnnnnnnnnnnnnnnnnnnnnnnnnnnnnnnnnnnnnnnnnnnnnnnnnnnnnnnnnnnnnnnnnnnnnnnnnnnnnnnnnnnnnnnnnnnnnnnnnnnnnnnnnnnnnnnnnnnnnnnnnnnnnnnnnnnnnnnnnnnnnnnnnnnnnnnnnnnnnnnnnnnnnnnnnnnnnnnnnnnnnnnnnnnnnnnnnnnnnnnnnnnnnnnnnnnnnnnnnnnnnnnnnnnnnnnnnnnnnnnnnnnnnnnnnnnnnnnnnnnnnnnnnnnnnnnnnnnnnnnnnnnnnnnnnnnnnnnnnnnnnnnnnnnnnnnnnnnnnnnnnnnnnnnnnnnnnnnnnnnnnnnnnnnnnnnnnnnnnnnnnnnnnnnnnnnnnnnnnnnnnnnnnnnnnnnnnnnnnnnnnnnnnnnnnnnnnnnnnnnnnnnnnnnnnnnnnnnnnnnnnnnnnnnnnnnnnnnnnnnnnnnnnnnnnnnnnnnnnnnnnnnnnnnnnnnnnnnnnnnnnnnnnnnnnnnnnnnnnnnnnnnnnnnnnnnnnnnnnnnnnnnnnnnnnnnnnnnnnnnnnnnnnnnnnnnnnnnnnnnnnnnnnnnnnnnnnnnnnnnnnnnnnnnnnnnnnnnnnnnnnnnnnnnnnnnnnnnnnnnnnnnnnnnnnnnnnnnnnnnnnnnnnnnnnnnnnnnnnnnnnnnnnnnnnnnnnnnnnnnnnnnnnnnnnnnnnnnnnnnnnnnnnnnnnnnnnnnnnnnnnnnnnnnnnnnnnnnnnnnnnnnnnnnnnnnnnnnnnnnnnnnnnnnnnnnnnnnnnnnnnnnnnnnnnnnnnnnnnnnnnnnnnnnnnnnnnnnnnnnnnnnnnnnnnnnnnnnnnnnnnnnnnnnnnnnnnnnnnnnnnnnnnnnnnnnnnnnnnnnnnnnnnnnnnnnnnnnnnnnnnnnnnnnnnnnnnnnnnnnnnnnnnnnnnnnnnnnnnnnnnnnnnnnnnnnnnnnnnnnnnnnnnnnnnnnnnnnnnnnnnnnnnnnnnnnnnnnnnnnnnnnnnnnnnnnnnnnnnnnnnnnnnnnnnnnnnnnnnnnnnnnnnnnnnnnnnnnnnnnnnnnnnnnnnnnnnnnnnnnnnnnnnnnnnnnnnnnnnnnnnnnnnnnnnnnnnnnnnnnnnnnnnnnnnnnnnnnnnnnnnnnnnnnnnnnnnnnnnnnnnnnnnnnnnnnnnnnnnnnnnnnnnnnnnnnnnnnnnnnnnnnnnnnnnnnnnnnnnnnnnnnnnnnnnnnnnnnnnnnnnnnnnnnnnnnnnnnnnnnnnnnnnnnnnnnnnnnnnnnnnnnnnnnnnnnnnnnnnnnnnnnnnnnnnnnnnnnnnnnnnnnnnnnnnnnnnnnnnnnnnnnnnnnnnnnnnnnnnnnnnnnnnnnnnnnnnnnnnnnnnnnnnnnnnnnnnnnnnnnnnnnnnnnnnnnnnnnnnnnnnnnnnnnnnnnnnnnnnnnnnnnnnnnnnnnnnnnnnnnnnnnnnnnnnnnnnnnnnnnnnnnnnnnnnnnnnnnnnnnnnnnnnnnnnnnnnnnnnnnnnnnnnnnnnnnnnnnnnnnnnnnnnnnnnnnnnnnnnnnnnnnnnnnnnnnnnnnnnnnnnnnnnnnnnnnnnnnnnnnnnnnnnnnnnnnnnnnnnnnnnnnnnnnnnnnnnnnnnnnnnnnnnnnnnnnnnnnnnnnnnnnnnnnnnnnnnnnnnnnnnnnnnnnnnnnnnnnnnnnnnnnnnnnnnnnnnnnnnnnnnnnnnnnnnnnnnnnnnnnnnnnnnnnnnnnnnnnnnnnnnnnnnnnnnnnnnnnnnnnnnnnnnnnnnnnnnnnnnnnnnnnnnnnnnnnnnnnnnnnnnnnnnnnnnnnnnnnnnnnnnnnnnnnnnnnnnnnnnnnnnnnnnnnnnnnnnnnnnnnnnnnnnnnnnnnnnnnnnnnnnnnnnnnnnnnnnnnnnnnnnnnnnnnnnnnnnnnnnnnnnnnnnnnnnnnnnnnnnnnnnnnnnnnnnnnnnnnnnnnnnnnnnnnnnnnnnnnnnnnnnnnnnnnnnnnnnnnnnnnnnnnnnnnnnnnnnnnnnnnnnnnnnnnnnnnnnnnnnnnnnnnnnnnnnnnnnnnnnnnnnnnnnnnnnnnnnnnnnnnnnnnnnnnnnnnnnnnnnnnnnnnnnnnnnnnnnnnnnnnnnnnnnnnnnnnnnnnnnnnnnnnnnnnnnnnnnnnnnnnnnnnnnnnnnnnnnnnnnnnnnnnnnnnnnnnnnnnnnnnnnnnnnnnnnnnnnnnnnnnnnnnnnnnnnnnnnnnnnnnnnnnnnnnnnnnnnnnnnnnnnnnnnnnnnnnnnnnnnnnnnnnnnnnnnnnnnnnnnnnnnnnnnnnnnnnnnnnnnnnnnnnnnnnnnnnnnnnnnnnnnnnnnnnnnnnnnnnnnnnnnnnnnnnnnnnnnnnnnnnnnnnnnnnnnnnnnnnnnnnnnnnnnnnnnnnnnnnnnnnnnnnnnnnnnnnnnnnnnnnnnnnnnnnnnnnnnnnnnnnnnnnnnnnnnnnnnnnnnnnnnnnnnnnnnnnnnnnnnnnnnnnnnnnnnnnnnnnnnnnnnnnnnnnnnnnnnnnnnnnnnnnnnnnnnnnnnnnnnnnnnnnnnnnnnnnnnnnnnnnnnnnnnnnnnnnnnnnnnnnnnnnnnnnnnnnnnnnnnnnnnnnnnnnnnnnnnnnnnnnnnnnnnnnnnnnnnnnnnnnnnnnnnnnnnnnnnnnnnnnnnnnnnnnnnnnnnnnnnnnnnnnnnnnnnnnnnnnnnnnnnnnnnnnnnnnnnnnnnnnnnnnnnnnnnnnnnnnnnnnnnnnnnnnnnnnnnnnnnnnnnnnnnnnnnnnnnnnnnnnnnnnnnnnnnnnnnnnnnnnnnnnnnnnnnnnnnnnnnnnnnnnnnnnnnnnnnnnnnnnnnnnnnnnnnnnnnnnnnnnnnnnnnnnnnnnnnnnnnnnnnnnnnnnnnnnnnnnnnnnnnnnnnnnnnnnnnnnnnnnnnnnnnnnnnnnnnnnnnnnnnnnnnnnnnnnnnnnnnnnnnnnnnnnnnnnnnnnnnnnnnnnnnnnnnnnnnnnnnnnnnnnnnnnnnnnnnnnnnnnnnnnnnnnnnnnnnnnnnnnnnnnnnnnnnnnnnnnnnnnnnnnnnnnnnnnnnnnnnnnnnnnnnnnnnnnnnnnnnnnnnnnnnnnnnnnnnnnnnnnnnnnnnnnnnnnnnnnnnnnnnnnnnnnnnnnnnnnnnnnnnnnnnnnnnnnnnnnnnnnnnnnnnnnnnnnnnnnnnnnnnnnnnnnnnnnnnnnnnnnnnnnnnnnnnnnnnnnnnnnnnnnnnnnnnnnnnnnnnnnnnnnnnnnnnnnnnnnnnnnnnnnnnnnnnnnnnnnnnnnnnnnnnnnnnnnnnnnnnnnnnnnnnnnnnnnnnnnnnnnnnnnnnnnnnnnnnnnnnnnnnnnnnnnnnnnnnnnnnnnnnnnnnnnnnnnnnnnnnnnnnnnnnnnnnnnnnnnnnnnnnnnnnnnnnnnnnnnnnnnnnnnnnnnnnnnnnnnnnnnnnnnnnnnnnnnnnnnnnnnnnnnnnnnnnnnnnnnnnnnnnnnnnnnnnnnnnnnnnnnnnnnnnnnnnnnnnnnnnnnnnnnnnnnnnnnnnnnnnnnnnnnnnnnnnnnnnnnnnnnnnnnnnnnnnnnnnnnnnnnnnnnnnnnnnnnnnnnnnnnnnnnnnnnnnnnnnnnnnnnnnnnnnnnnnnnnnnnnnnnnnnnnnnnnnnnnnnnnnnnnnnnnnnnnnnnnnnnnnnnnnnnnnnnnnnnnnnnnnnnnnnnnnnnnnnnnnnnnnnnnnnnnnnnnnnnnnnnnnnnnnnnnnnnnnnnnnnnnnnnnnnnnnnnnnnnnnnnnnnnnnnnnnnnnnnnnnnnnnnnnnnnnnnnnnnnnnnnnnnnnnnnnnnnnnnnnnnnnnnnnnnnnnnnnnnnnnnnnnnnnnnnnnnnnnnnnnnnnnnnnnnnnnnnnnnnnnnnnnnnnnnnnnnnnnnnnnnnnnnnnnnnnnnnnnnnnnnnnnnnnnnnnnnnnnnnnnnnnnnnnnnnnnnnnnnnnnnnnnnnnnnnnnnnnnnnnnnnnnnnnnnnnnnnnnnnnnnnnnnnnnnnnnnnnnnnnnnnnnnnnnnnnnnnnnnnnnnnnnnnnnnnnnnnnnnnnnnnnnnnnnnnnnnnnnnnnnnnnnnnnnnnnnnnnnnnnnnnnnnnnnnnnnnnnnnnnnnnnnnnnnnnnnnnnnnnnnnnnnnnnnnnnnnnnnnnnnnnnnnnnnnnnnnnnnnnnnnnnnnnnnnnnnnnnnnnnnnnnnnnnnnnnnnnnnnnnnnnnnnnnnnnnnnnnnnnnnnnnnnnnnnnnnnnnnnnnnnnnnnnnnnnnnnnnnnnnnnnnnnnnnnnnnnnnnnnnnnnnnnnnnnnnnnnnnnnnnnnnnnnnnnnnnnnnnnnnnnnnnnnnnnnnnnnnnnnnnnnnnnnnnnnnnnnnnnnnnnnnnnnnnnnnnnnnnnnnnnnnnnnnnnnnnnnnnnnnnnnnnnnnnnnnnnnnnnnnnnnnnnnnnnnnnnnnnnnnnnnnnnnnnnnnnnnnnnnnnnnnnnnnnnnnnnnnnnnnnnnnnnnnnnnnnnnnnnnnnnnnnnnnnnnnnnnnnnnnnnnnnnnnnnnnnnnnnnnnnnnnnnnnnnnnnnnnnnnnnnnnnnnnnnnnnnnnnnnnnnnnnnnnnnnnnnnnnnnnnnnnnnnnnnnnnnnnnnnnnnnnnnnnnnnnnnnnnnnnnnnnnnnnnnnnnnnnnnnnnnnnnnnnnnnnnnnnnnnnnnnnnnnnnnnnnnnnnnnnnnnnnnnnnnnnnnnnnnnnnnnnnnnnnnnnnnnnnnnnnnnnnnnnnnnnnnnnnnnnnnnnnnnnnnnnnnnnnnnnnnnnnnnnnnnnnnnnnnnnnnnnnnnnnnnnnnnnnnnnnnnnnnnnnnnnnnnnnnnnnnnnnnnnnnnnnnnnnnnnnnnnnnnnnnnnnnnnnnnnnnnnnnnnnnnnnnnnnnnnnnnnnnnnnnnnnnnnnnnnnnnnnnnnnnnnnnnnnnnnnnnnnnnnnnnnnnnnnnnnnnnnnnnnnnnnnnnnnnnnnnnnnnnnnnnnnnnnnnnnnnnnnnnnnnnnnnnnnnnnnnnnnnnnnnnnnnnnnnnnnnnnnnnnnnnnnnnnnnnnnnnnnnnnnnnnnnnnnnnnnnnnnnnnnnnnnnnnnnnnnnnnnnnnnnnnnnnnnnnnnnnnnnnnnnnnnnnnnnnnnnnnnnnnnnnnnnnnnnnnnnnnnnnnnnnnnnnnnnnnnnnnnnnnnnnnnnnnnnnnnnnnnnnnnnnnnnnnnnnnnnnnnnnnnnnnnnnnnnnnnnnnnnnnnnnnnnnnnnnnnnnnnnnnnnnnnnnnnnnnnnnnnnnnnnnnnnnnnnnnnnnnnnnnnnnnnnnnnnnnnnnnnnnnnnnnnnnnnnnnnnnnnnnnnnnnnnnnnnnnnnnnnnnnnnnnnnnnnnnnnnnnnnnnnnnnnnnnnnnnnnnnnnnnnnnnnnnnnnnnnnnnnnnnnnnnnnnnnnnnnnnnnnnnnnnnnnnnnnnnnnnnnnnnnnnnnnnnnnnnnnnnnnnnnnnnnnnnnnnnnnnnnnnnnnnnnnnnnnnnnnnnnnnnnnnnnnnnnnnnnnnnnnnnnnnnnnnnnnnnnnnnnnnnnnnnnnnnnnnnnnnnnnnnnnnnnnnnnnnnnnnnnnnnnnnnnnnnnnnnnnnnnnnnnnnnnnnnnnnnnnnnnnnnnnnnnnnnnnnnnnnnnnnnnnnnnnnnnnnnnnnnnnnnnnnnnnnnnnnnnnnnnnnnnnnnnnnnnnnnnnnnnnnnnnnnnnnnnnnnnnnnnnnnnnnnnnnnnnnnnnnnnnnnnnnnnnnnnnnnnnnnnnnnnnnnnnnnnnnnnnnnnnnnnnnnnnnnnnnnnnnnnnnnnnnnnnnnnnnnnnnnnnnnnnnnnnnnnnnnnnnnnnnnnnnnnnnnnnnnnnnnnnnnnnnnnnnnnnnnnnnnnnnnnnnnnnnnnnnnnnnnnnnnnnnnnnnnnnnnnnnnnnnnnnnnnnnnnnnnnnnnnnnnnnnnnnnnnnnnnnnnnnnnnnnnnnnnnnnnnnnnnnnnnnnnnnnnnnnnnnnnnnnnnnnnnnnnnnnnnnnnnnnnnnnnnnnnnnnnnnnnnnnnnnnnnnnnnnnnnnnnnnnnnnnnnnnnnnnnnnnnnnnnnnnnnnnnnnnnnnnnnnnnnnnnnnnnnnnnnnnnnnnnnnnnnnnnnnnnnnnnnnnnnnnnnnnnnnnnnnnnnnnnnnnnnnnnnnnnnnnnnnnnnnnnnnnnnnnnnnnnnnnnnnnnnnnnnnnnnnnnnnnnnnnnnnnnnnnnnnnnnnnnnnnnnnnnnnnnnnnnnnnnnnnnnnnnnnnnnnnnnnnnnnnnnnnnnnnnnnnnnnnnnnnnnnnnnnnnnnnnnnnnnnnnnnnnnnnnnnnnnnnnnnnnnnnnnnnnnnnnnnnnnnnnnnnnnnnnnnnnnnnnnnnnnnnnnnnnnnnnnnnnnnnnnnnnnnnnnnnnnnnnnnnnnnnnnnnnnnnnnnnnnnnnnnnnnnnnnnnnnnnnnnnnnnnnnnnnnnnnnnnnnnnnnnnnnnnnnnnnnnnnnnnnnnnnnnnnnnnnnnnnnnnnnnnnnnnnnnnnnnnnnnnnnnnnnnnnnnnnnnnnnnnnnnnnnnnnnnnnnnnnnnnnnnnnnnnnnnnnnnnnnnnnnnnnnnnnnnnnnnnnnnnnnnnnnnnnnnnnnnnnnnnnnnnnnnnnnnnnnnnnnnnnnnnnnnnnnnnnnnnnnnnnnnnnnnnnnnnnnnnnnnnnnnnnnnnnnnnnnnnnnnnnnnnnnnnnnnnnnnnnnnnnnnnnnnnnnnnnnnnnnnnnnnnnnnnnnnnnnnnnnnnnnnnnnnnnnnnnnnnnnnnnnnnnnnnnnnnnnnnnnnnnnnnnnnnnnnnnnnnnnnnnnnnnnnnnnnnnnnnnnnnnnnnnnnnnnnnnnnnnnnnnnnnnnnnnnnnnnnnnnnnnnnnnnnnnnnnnnnnnnnnnnnnnnnnnnnnnnnnnnnnnnnnnnnnnnnnnnnnnnnnnnnnnnnnnnnnnnnnnnnnnnnnnnnnnnnnnnnnnnnnnnnnnnnnnnnnnnnnnnnnnnnnnnnnnnnnnnnnnnnnnnnnnnnnnnnnnnnnnnnnnnnnnnnnnnnnnnnnnnnnnnnnnnnnnnnnnnnnnnnnnnnnnnnnnnnnnnnnnnnnnnnnnnnnnnnnnnnnnnnnnnnnnnnnnnnnnnnnnnnnnnnnnnnnnnnnnnnnnnnnnnnnnnnnnnnnnnnnnnnnnnnnnnnnnnnnnnnnnnnnnnnnnnnnnnnnnnnnnnnnnnnnnnnnnnnnnnnnnnnnnnnnnnnnnnnnnnnnnnnnnnnnnnnnnnnnnnnnnnnnnnnnnnnnnnnnnnnnnnnnnnnnnnnnnnnnnnnnnnnnnnnnnnnnnnnnnnnnnnnnnnnnnnnnnnnnnnnnnnnnnnnnnnnnnnnnnnnnnnnnnnnnnnnnnnnnnnnnnnnnnnnnnnnnnnnnnnnnnnnnnnnnnnnnnnnnnnnnnnnnnnnnnnnnnnnnnnnnnnnnnnnnnnnnnnnnnnnnnnnnnnnnnnnnnnnnnnnnnnnnnnnnnnnnnnnnnnnnnnnnnnnnnnnnnnnnnnnnnnnnnnnnnnnnnnnnnnnnnnnnnnnnnnnnnnnnnnnnnnnnnnnnnnnnnnnnnnnnnnnnnnnnnnnnnnnnnnnnnnnnnnnnnnnnnnnnnnnnnnnnnnnnnnnnnnnnnnnnnnnnnnnnnnnnnnnnnnnnnnnnnnnnnnnnnnnnnnnnnnnnnnnnnnnnnnnnnnnnnnnnnnnnnnnnnnnnnnnnnnnnnnnnnnnnnnnnnnnnnnnnnnnnnnnnnnnnnnnnnnnnnnnnnnnnnnnnnnnnnnnnnnnnnnnnnnnnnnnnnnnnnnnnnnnnnnnnnnnnnnnnnnnnnnnnnnnnnnnnnnnnnnnnnnnnnnnnnnnnnnnnnnnnnnnnnnnnnnnnnnnnnnnnnnnnnnnnnnnnnnnnnnnnnnnnnnnnnnnnnnnnnnnnnnnnnnnnnnnnnnnnnnnnnnnnnnnnnnnnnnnnnnnnnnnnnnnnnnnnnnnnnnnnnnnnnnnnnnnnnnnnnnnnnnnnnnnnnnnnnnnnnnnnnnnnnnnnnnnnnnnnnnnnnnnnnnnnnnnnnnnnnnnnnnnnnnnnnnnnnnnnnnnnnnnnnnnnnnnnnnnnnnnnnnnnnnnnnnnnnnnnnnnnnnnnnnnnnnnnnnnnnnnnnnnnnnnnnnnnnnnnnnnnnnnnnnnnnnnnnnnnnnnnnnnnnnnnnnnnnnnnnnnnnnnnnnnnnnnnnnnnnnnnnnnnnnnnnnnnnnnnnnnnnnnnnnnnnnnnnnnnnnnnnnnnnnnnnnnnnnnnnnnnnnnnnnnnnnnnnnnnnnnnnnnnnnnnnnnnnnnnnnnnnnnnnnnnnnnnnnnnnnnnnnnnnnnnnnnnnnnnnnnnnnnnnnnnnnnnnnnnnnnnnnnnnnnnnnnnnnnnnnnnnnnnnnnnnnnnnnnnnnnnnnnnnnnnnnnnnnnnnnnnnnnnnnnnnnnnnnnnnnnnnnnnnnnnnnnnnnnnnnnnnnnnnnnnnnnnnnnnnnnnnnnnnnnnnnnnnnnnnnnnnnnnnnnnnnnnnnnnnnnnnnnnnnnnnnnnnnnnnnnnnnnnnnnnnnnnnnnnnnnnnnnnnnnnnnnnnnnnnnnnnnnnnnnnnnnnnnnnnnnnnnnnnnnnnnnnnnnnnnnnnnnnnnnnnnnnnnnnnnnnnnnnnnnnnnnnnnnnnnnnnnnnnnnnnnnnnnnnnnnnnnnnnnnnnnnnnnnnnnnnnnnnnnnnnnnnnnnnnnnnnnnnnnnnnnnnnnnnnnnnnnnnnnnnnnnnnnnnnnnnnnnnnnnnnnnnnnnnnnnnnnnnnnnnnnnnnnnnnnnnnnnnnnnnnnnnnnnnnnnnnnnnnnnnnnnnnnnnnnnnnnnnnnnnnnnnnnnnnnnnnnnnnnnnnnnnnnnnnnnnnnnnnnnnnnnnnnnnnnnnnnnnnnnnnnnnnnnnnnnnnnnnnnnnnnnnnnnnnnnnnnnnnnnnnnnnnnnnnnnnnnnnnnnnnnnnnnnnnnnnnnnnnnnnnnnnnnnnnnnnnnnnnnnnnnnnnnnnnnnnnnnnnnnnnnnnnnnnnnnnnnnnnnnnnnnnnnnnnnnnnnnnnnnnnnnnnnnnnnnnnnnnnnnnnnnnnnnnnnnnnnnnnnnnnnnnnnnnnnnnnnnnnnnnnnnnnnnnnnnnnnnnnnnnnnnnnnnnnnnnnnnnnnnnnnnnnnnnnnnnnnnnnnnnnnnnnnnnnnnnnnnnnnnnnnnnnnnnnnnnnnnnnnnnnnnnnnnnnnnnnnnnnnnnnnnnnnnnnnnnnnnnnnnnnnnnnnnnnnnnnnnnnnnnnnnnnnnnnnnnnnnnnnnnnnnnnnnnnnnnnnnnnnnnnnnnnnnnnnnnnnnnnnnnnnnnnnnnnnnnnnnnnnnnnnnnnnnnnnnnnnnnnnnnnnnnnnnnnnnnnnnnnnnnnnnnnnnnnnnnnnnnnnnnnnnnnnnnnnnnnnnnnnnnnnnnnnnnnnnnnnnnnnnnnnnnnnnnnnnnnnnnnnnnnnnnnnnnnnnnnnnnnnnnnnnnnnnnnnnnnnnnnnnnnnnnnnnnnnnnnnnnnnnnnnnnnnnnnnnnnnnnnnnnnnnnnnnnnnnnnnnnnnnnnnnnnnnnnnnnnnnnnnnnnnnnnnnnnnnnnnnnnnnnnnnnnnnnnnnnnnnnnnnnnnnnnnnnnnnnnnnnnnnnnnnnnnnnnnnnnnnnnnnnnnnnnnnnnnnnnnnnnnnnnnnnnnnnnnnnnnnnnnnnnnnnnnnnnnnnnnnnnnnnnnnnnnnnnnnnnnnnnnnnnnnnnnnnnnnnnnnnnnnnnnnnnnnnnnnnnnnnnnnnnnnnnnnnnnnnnnnnnnnnnnnnnnnnnnnnnnnnnnnnnnnnnnnnnnnnnnnnnnnnnnnnnnnnnnnnnnnnnnnnnnnnnnnnnnnnnnnnnnnnnnnnnnnnnnnnnnnnnnnnnnnnnnnnnnnnnnnnnnnnnnnnnnnnnnnnnnnnnnnnnnnnnnnnnnnnnnnnnnnnnnnnnnnnnnnnnnnnnnnnnnnnnnnnnnnnnnnnnnnnnnnnnnnnnnnnnnnnnnnnnnnnnnnnnnnnnnnnnnnnnnnnnnnnnnnnnnnnnnnnnnnnnnnnnnnnnnnnnnnnnnnnnnnnnnnnnnnnnnnnnnnnnnnnnnnnnnnnnnnnnnnnnnnnnnnnnnnnnnnnnnnnnnnnnnnnnnnnnnnnnnnnnnnnnnnnnnnnnnnnnnnnnnnnnnnnnnnnnnnnnnnnnnnnnnnnnnnnnnnnnnnnnnnnnnnnnnnnnnnnnnnnnnnnnnnnnnnnnnnnnnnnnnnnnnnnnnnnnnnnnnnnnnnnnnnnnnnnnnnnnnnnnnnnnnnnnnnnnnnnnnnnnnnnnnnnnnnnnnnnnnnnnnnnnnnnnnnnnnnnnnnnnnnnnnnnnnnnnnnnnnnnnnnnnnnnnnnnnnnnnnnnnnnnnnnnnnnnnnnnnnnnnnnnnnnnnnnnnnnnnnnnnnnnnnnnnnnnnnnnnnnnnnnnnnnnnnnnnnnnnnnnnnnnnnnnnnnnnnnnnnnnnnnnnnnnnnnnnnnnnnnnnnnnnnnnnnnnnnnnnnnnnnnnnnnnnnnnnnnnnnnnnnnnnnnnnnnnnnnnnnnnnnnnnnnnnnnnnnnnnnnnnnnnnnnnnnnnnnnnnnnnnnnnnnnnnnnnnnnnnnnnnnnnnnnnnnnnnnnnnnnnnnnnnnnnnnnnnnnnnnnnnnnnnnnnnnnnnnnnnnnnnnnnnnnnnnnnnnnnnnnnnnnnnnnnnnnnnnnnnnnnnnnnnnnnnnnnnnnnnnnnnnnnnnnnnnnnnnnnnnnnnnnnnnnnnnnnnnnnnnnnnnnnnnnnnnnnnnnnnnnnnnnnnnnnnnnnnnnnnnnnnnnnnnnnnnnnnnnnnnnnnnnnnnnnnnnnnnnnnnnnnnnnnnnnnnnnnnnnnnnnnnnnnnnnnnnnnnnnnnnnnnnnnnnnnnnnnnnnnnnnnnnnnnnnnnnnnnnnnnnnnnnnnnnnnnnnnnnnnnnnnnnnnnnnnnnnnnnnnnnnnnnnnnnnnnnnnnnnnnnnnnnnnnnnnnnnnnnnnnnnnnnnnnnnnnnnnnnnnnnnnnnnnnnnnnnnnnnnnnnnnnnnnnnnnnnnnnnnnnnnnnnnnnnnnnnnnnnnnnnnnnnnnnnnnnnnnnnnnnnnnnnnnnnnnnnnnnnnnnnnnnnnnnnnnnnnnnnnnnnnnnnnnnnnnnnnnnnnnnnnnnnnnnnnnnnnnnnnnnnnnnnnnnnnnnnnnnnnnnnnnnnnnnnnnnnnnnnnnnnnnnnnnnnnnnnnnnnnnnnnnnnnnnnnnnnnnnnnnnnnnnnnnnnnnnnnnnnnnnnnnnnnnnnnnnnnnnnnnnnnnnnnnnnnnnnnnnnnnnnnnnnnnnnnnnnnnnnnnnnnnnnnnnnnnnnnnnnnnnnnnnnnnnnnnnnnnnnnnnnnnnnnnnnnnnnnnnnnnnnnnnnnnnnnnnnnnnnnnnnnnnnnnnnnnnnnnnnnnnnnnnnnnnnnnnnnnnnnnnnnnnnnnnnnnnnnnnnnnnnnnnnnnnnnnnnnnnnnnnnnnnnnnnnnnnnnnnnnnnnnnnnnnnnnnnnnnnnnnnnnnnnnnnnnnnnnnnnnnnnnnnnnnnnnnnnnnnnnnnnnnnnnnnnnnnnnnnnnnnnnnnnnnnnnnnnnnnnnnnnnnnnnnnnnnnnnnnnnnnnnnnnnnnnnnnnnnnnnnnnnnnnnnnnnnnnnnnnnnnnnnnnnnnnnnnnnnnnnnnnnnnnnnnnnnnnnnnnnnnnnnnnnnnnnnnnnnnnnnnnnnnnnnnnnnnnnnnnnnnnnnnnnnnnnnnnnnnnnnnnnnnnnnnnnnnnnnnnnnnnnnnnnnnnnnnnnnnnnnnnnnnnnnnnnnnnnnnnnnnnnnnnnnnnnnnnnnnnnnnnnnnnnnnnnnnnnnnnnnnnnnnnnnnnnnnnnnnnnnnnnnnnnnnnnnnnnnnnnnnnnnnnnnnnnnnnnnnnnnnnnnnnnnnnnnnnnnnnnnnnnnnnnnnnnnnnnnnnnnnnnnnnnnnnnnnnnnnnnnnnnnnnnnnnnnnnnnnnnnnnnnnnnnnnnnnnnnnnnnnnnnnnnnnnnnnnnnnnnnnnnnnnnnnnnnnnnnnnnnnnnnnnnnnnnnnnnnnnnnnnnnnnnnnnnnnnnnnnnnnnnnnnnnnnnnnnnnnnnnnnnnnnnnnnnnnnnnnnnnnnnnnnnnnnnnnnnnnnnnnnnnnnnnnnnnnnnnnnnnnnnnnnnnnnnnnnnnnnnnnnnnnnnnnnnnnnnnnnnnnnnnnnnnnnnnnnnnnnnnnnnnnnnnnnnnnnnnnnnnnnnnnnnnnnnnnnnnnnnnnnnnnnnnnnnnnnnnnnnnnnnnnnnnnnnnnnnnnnnnnnnnnnnnnnnnnnnnnnnnnnnnnnnnnnnnnnnnnnnnnnnnnnnnnnnnnnnnnnnnnnnnnnnnnnnnnnnnnnnnnnnnnnnnnnnnnnnnnnnnnnnnnnnnnnnnnnnnnnnnnnnnnnnnnnnnnnnnnnnnnnnnnnnnnnnnnnnnnnnnnnnnnnnnnnnnnnnnnnnnnnnnnnnnnnnnnnnnnnnnnnnnnnnnnnnnnnnnnnnnnnnnnnnnnnnnnnnnnnnnnnnnnnnnnnnnnnnnnnnnnnnnnnnnnnnnnnnnnnnnnnnnnnnnnnnnnnnnnnnnnnnnnnnnnnnnnnnnnnnnnnnnnnnnnnnnnnnnnnnnnnnnnnnnnnnnnnnnnnnnnnnnnnnnnnnnnnnnnnnnnnnnnnnnnnnnnnnnnnnnnnnnnnnnnnnnnnnnnnnnnnnnnnnnnnnnnnnnnnnnnnnnnnnnnnnnnnnnnnnnnnnnnnnnnnnnnnnnnnnnnnnnnnnnnnnnnnnnnnnnnnnnnnnnnnnnnnnnnnnnnnnnnnnnnnnnnnnnnnnnnnnnnnnnnnnnnnnnnnnnnnnnnnnnnnnnnnnnnnnnnnnnnnnnnnnnnnnnnnnnnnnnnnnnnnnnnnnnnnnnnnnnnnnnnnnnnnnnnnnnnnnnnnnnnnnnnnnnnnnnnnnnnnnnnnnnnnnnnnnnnnnnnnnnnnnnnnnnnnnnnnnnnnnnnnnnnnnnnnnnnnnnnnnnnnnnnnnnnnnnnnnnnnnnnnnnnnnnnnnnnnnnnnnnnnnnnnnnnnnnnnnnnnnnnnnnnnnnnnnnnnnnnnnnnnnnnnnnnnnnnnnnnnnnnnnnnnnnnnnnnnnnnnnnnnnnnnnnnnnnnnnnnnnnnnnnnnnnnnnnnnnnnnnnnnnnnnnnnnnnnnnnnnnnnnnnnnnnnnnnnnnnnnnnnnnnnnnnnnnnnnnnnnnnnnnnnnnnnnnnnnnnnnnnnnnnnnnnnnnnnnnnnnnnnnnnnnnnnnnnnnnnnnnnnnnnnnnnnnnnnnnnnnnnnnnnnnnnnnnnnnnnnnnnnnnnnnnnnnnnnnnnnnnnnnnnnnnnnnnnnnnnnnnnnnnnnnnnnnnnnnnnnnnnnnnnnnnnnnnnnnnnnnnnnnnnnnnnnnnnnnnnnnnnnnnnnnnnnnnnnnnnnnnnnnnnnnnnnnnnnnnnnnnnnnnnnnnnnnnnnnnnnnnnnnnnnnnnnnnnnnnnnnnnnnnnnnnnnnnnnnnnnnnnnnnnnnnnnnnnnnnnnnnnnnnnnnnnnnnnnnnnnnnnnnnnnnnnnnnnnnnnnnnnnnnnnnnnnnnnnnnnnnnnnnnnnnnnnnnnnnnnnnnnnnnnnnnnnnnnnnnnnnnnnnnnnnnnnnnnnnnnnnnnnnnnnnnnnnnnnnnnnnnnnnnnnnnnnnnnnnnnnnnnnnnnnnnnnnnnnnnnnnnnnnnnnnnnnnnnnnnnnnnnnnnnnnnnnnnnnnnnnnnnnnnnnnnnnnnnnnnnnnnnnnnnnnnnnnnnnnnnnnnnnnnnnnnnnnnnnnnnnnnnnnnnnnnnnnnnnnnnnnnnnnnnnnnnnnnnnnnnnnnnnnnnnnnnnnnnnnnnnnnnnnnnnnnnnnnnnnnnnnnnnnnnnnnnnnnnnnnnnnnnnnnnnnnnnnnnnnnnnnnnnnnnnnnnnnnnnnnnnnnnnnnnnnnnnnnnnnnnnnnnnnnnnnnnnnnnnnnnnnnnnnnnnnnnnnnnnnnnnnnnnnnnnnnnnnnnnnnnnnnnnnnnnnnnnnnnnnnnnnnnnnnnnnnnnnnnnnnnnnnnnnnnnnnnnnnnnnnnnnnnnnnnnnnnnnnnnnnnnnnnnnnnnnnnnnnnnnnnnnnnnnnnnnnnnnnnnnnnnnnnnnnnnnnnnnnnnnnnnnnnnnnnnnnnnnnnnnnnnnnnnnnnnnnnnnnnnnnnnnnnnnnnnnnnnnnnnnnnnnnnnnnnnnnnnnnnnnnnnnnnnnnnnnnnnnnnnnnnnnnnnnnnnnnnnnnnnnnnnnnnnnnnnnnnnnnnnnnnnnnnnnnnnnnnnnnnnnnnnnnnnnnnnnnnnnnnnnnnnnnnnnnnnnnnnnnnnnnnnnnnnnnnnnnnnnnnnnnnnnnnnnnnnnnnnnnnnnnnnnnnnnnnnnnnnnnnnnnnnnnnnnnnnnnnnnnnnnnnnnnnnnnnnnnnnnnnnnnnnnnnnnnnnnnnnnnnnnnnnnnnnnnnnnnnnnnnnnnnnnnnnnnnnnnnnnnnnnnnnnnnnnnnnnnnnnnnnnnnnnnnnnnnnnnnnnnnnnnnnnnnnnnnnnnnnnnnnnnnnnnnnnnnnnnnnnnnnnnnnnnnnnnnnnnnnnnnnnnnnnnnnnnnnnnnnnnnnnnnnnnnnnnnnnnnnnnnnnnnnnnnnnnnnnnnnnnnnnnnnnnnnnnnnnnnnnnnnnnnnnnnnnnnnnnnnnnnnnnnnnnnnnnnnnnnnnnnnnnnnnnnnnnnnnnnnnnnnnnnnnnnnnnnnnnnnnnnnnnnnnnnnnnnnnnnnnnnnnnnnnnnnnnnnnnnnnnnnnnnnnnnnnnnnnnnnnnnnnnnnnnnnnnnnnnnnnnnnnnnnnnnnnnnnnnnnnnnnnnnnnnnnnnnnnnnnnnnnnnnnnnnnnnnnnnnnnnnnnnnnnnnnnnnnnnnnnnnnnnnnnnnnnnnnnnnnnnnnnnnnnnnnnnnnnnnnnnnnnnnnnnnnnnnnnnnnnnnnnnnnnnnnnnnnnnnnnnnnnnnnnnnnnnnnnnnnnnnnnnnnnnnnnnnnnnnnnnnnnnnnnnnnnnnnnnnnnnnnnnnnnnnnnnnnnnnnnnnnnnnnnnnnnnnnnnnnnnnnnnnnnnnnnnnnnnnnnnnnnnnnnnnnnnnnnnnnnnnnnnnnnnnnnnnnnnnnnnnnnnnnnnnnnnnnnnnnnnnnnnnnnnnnnnnnnnnnnnnnnnnnnnnnnnnnnnnnnnnnnnnnnnnnnnnnnnnnnnnnnnnnnnnnnnnnnnnnnnnnnnnnnnnnnnnnnnnnnnnnnnnnnnnnnnnnnnnnnnnnnnnnnnnnnnnnnnnnnnnnnnnnnnnnnnnnnnnnnnnnnnnnnnnnnnnnnnnnnnnnnnnnnnnnnnnnnnnnnnnnnnnnnnnnnnnnnnnnnnnnnnnnnnnnnnnnnnnnnnnnnnnnnnnnnnnnnnnnnnnnnnnnnnnnnnnnnnnnnnnnnnnnnnnnnnnnnnnnnnnnnnnnnnnnnnnnnnnnnnnnnnnnnnnnnnnnnnnnnnnnnnnnnnnnnnnnnnnnnnnnnnnnnnnnnnnnnnnnnnnnnnnnnnnnnnnnnnnnnnnnnnnnnnnnnnnnnnnnnnnnnnnnnnnnnnnnnnnnnnnnnnnnnnnnnnnnnnnnnnnnnnnnnnnnnnnnnnnnnnnnnnnnnnnnnnnnnnnnnnnnnnnnnnnnnnnnnnnnnnnnnnnnnnnnnnnnnnnnnnnnnnnnnnnnnnnnnnnnnnnnnnnnnnnnnnnnnnnnnnnnnnnnnnnnnnnnnnnnnnnnnnnnnnnnnnnnnnnnnnnnnnnnnnnnnnnnnnnnnnnnnnnnnnnnnnnnnnnnnnnnnnnnnnnnnnnnnnnnnnnnnnnnnnnnnnnnnnnnnnnnnnnnnnnnnnnnnnnnnnnnnnnnnnnnnnnnnnnnnnnnnnnnnnnnnnnnnnnnnnnnnnnnnnnnnnnnnnnnnnnnnnnnnnnnnnnnnnnnnnnnnnnnnnnnnnnnnnnnnnnnnnnnnnnnnnnnnnnnnnnnnnnnnnnnnnnnnnnnnnnnnnnnnnnnnnnnnnnnnnnnnnnnnnnnnnnnnnnnnnnnnnnnnnnnnnnnnnnnnnnnnnnnnnnnnnnnnnnnnnnnnnnnnnnnnnnnnnnnnnnnnnnnnnnnnnnnnnnnnnnnnnnnnnnnnnnnnnnnnnnnnnnnnnnnnnnnnnnnnnnnnnnnnnnnnnnnnnnnnnnnnnnnnnnnnnnnnnnnnnnnnnnnnnnnnnnnnnnnnnnnnnnnnnnnnnnnnnnnnnnnnnnnnnnnnnnnnnnnnnnnnnnnnnnnnnnnnnnnnnnnnnnnnnnnnnnnnnnnnnnnnnnnnnnnnnnnnnnnnnnnnnnnnnnnnnnnnnnnnnnnnnnnnnnnnnnnnnnnnnnnnnnnnnnnnnnnnnnnnnnnnnnnnnnnnnnnnnnnnnnnnnnnnnnnnnnnnnnnnnnnnnnnnnnnnnnnnnnnnnnnnnnnnnnnnnnnnnnnnnnnnnnnnnnnnnnnnnnnnnnnnnnnnnnnnnnnnnnnnnnnnnnnnnnnnnnnnnnnnnnnnnnnnnnnnnnnnnnnnnnnnnnnnnnnnnnnnnnnnnnnnnnnnnnnnnnnnnnnnnnnnnnnnnnnnnnnnnnnnnnnnnnnnnnnnnnnnnnnnnnnnnnnnnnnnnnnnnnnnnnnnnnnnnnnnnnnnnnnnnnnnnnnnnnnnnnnnnnnnnnnnnnnnnnnnnnnnnnnnnnnnnnnnnnnnnnnnnnnnnnnnnnnnnnnnnnnnnnnnnnnnnnnnnnnnnnnnnnnnnnnnnnnnnnnnnnnnnnnnnnnnnnnnnnnnnnnnnnnnnnnnnnnnnnnnnnnnnnnnnnnnnnnnnnnnnnnnnnnnnnnnnnnnnnnnnnnnnnnnnnnnnnnnnnnnnnnnnnnnnnnnnnnnnnnnnnnnnnnnnnnnnnnnnnnnnnnnnnnnnnnnnnnnnnnnnnnnnnnnnnnnnnnnnnnnnnnnnnnnnnnnnnnnnnnnnnnnnnnnnnnnnnnnnnnnnnnnnnnnnnnnnnnnnnnnnnnnnnnnnnnnnnnnnnnnnnnnnnnnnnnnnnnnnnnnnnnnnnnnnnnnnnnnnnnnnnnnnnnnnnnnnnnnnnnnnnnnnnnnnnnnnnnnnnnnnnnnnnnnnnnnnnnnnnnnnnnnnnnnnnnnnnnnnnnnnnnnnnnnnnnnnnnnnnnnnnnnnnnnnnnnnnnnnnnnnnnnnnnnnnnnnnnnnnnnnnnnnnnnnnnnnnnnnnnnnnnnnnnnnnnnnnnnnnnnnnnnnnnnnnnnnnnnnnnnnnnnnnnnnnnnnnnnnnnnnnnnnnnnnnnnnnnnnnnnnnnnnnnnnnnnnnnnnnnnnnnnnnnnnnnnnnnnnnnnnnnnnnnnnnnnnnnnnnnnnnnnnnnnnnnnnnnnnnnnnnnnnnnnnnnnnnnnnnnnnnnnnnnnnnnnnnnnnnnnnnnnnnnnnnnnnnnnnnnnnnnnnnnnnnnnnnnnnnnnnnnnnnnnnnnnnnnnnnnnnnnnnnnnnnnnnnnnnnnnnnnnnnnnnnnnnnnnnnnnnnnnnnnnnnnnnnnnnnnnnnnnnnnnnnnnnnnnnnnnnnnnnnnnnnnnnnnnnnnnnnnnnnnnnnnnnnnnnnnnnnnnnnnnnnnnnnnnnnnnnnnnnnnnnnnnnnnnnnnnnnnnnnnnnnnnnnnnnnnnnnnnnnnnnnnnnnnnnnnnnnnnnnnnnnnnnnnnnnnnnnnnnnnnnnnnnnnnnnnnnnnnnnnnnnnnnnnnnnnnnnnnnnnnnnnnnnnnnnnnnnnnnnnnnnnnnnnnnnnnnnnnnnnnnnnnnnnnnnnnnnnnnnnnnnnnnnnnnnnnnnnnnnnnnnnnnnnnnnnnnnnnnnnnnnnnnnnnnnnnnnnnnnnnnnnnnnnnnnnnnnnnnnnnnnnnnnnnnnnnnnnnnnnnnnnnnnnnnnnnnnnnnnnnnnnnnnnnnnnnnnnnnnnnnnnnnnnnnnnnnnnnnnnnnnnnnnnnnnnnnnnnnnnnnnnnnnnnnnnnnnnnnnnnnnnnnnnnnnnnnnnnnnnnnnnnnnnnnnnnnnnnnnnnnnnnnnnnnnnnnnnnnnnnnnnnnnnnnnnnnnnnnnnnnnnnnnnnnnnnnnnnnnnnnnnnnnnnnnnnnnnnnnnnnnnnnnnnnnnnnnnnnnnnnnnnnnnnnnnnnnnnnnnnnnnnnnnnnnnnnnnnnnnnnnnnnnnnnnnnnnnnnnnnnnnnnnnnnnnnnnnnnnnnnnnnnnnnnnnnnnnnnnnnnnnnnnnnnnnnnnnnnnnnnnnnnnnnnnnnnnnnnnnnnnnnnnnnnnnnnnnnnnnnnnnnnnnnnnnnnnnnnnnnnnnnnnnnnnnnnnnnnnnnnnnnnnnnnnnnnnnnnnnnnnnnnnnnnnnnnnnnnnnnnnnnnnnnnnnnnnnnnnnnnnnnnnnnnnnnnnnnnnnnnnnnnnnnnnnnnnnnnnnnnnnnnnnnnnnnnnnnnnnnnnnnnnnnnnnnnnnnnnnnnnnnnnnnnnnnnnnnnnnnnnnnnnnnnnnnnnnnnnnnnnnnnnnnnnnnnnnnnnnnnnnnnnnnnnnnnnnnnnnnnnnnnnnnnnnnnnnnnnnnnnnnnnnnnnnnnnnnnnnnnnnnnnnnnnnnnnnnnnnnnnnnnnnnnnnnnnnnnnnnnnnnnnnnnnnnnnnnnnnnnnnnnnnnnnnnnnnnnnnnnnnnnnnnnnnnnnnnnnnnnnnnnnnnnnnnnnnnnnnnnnnnnnnnnnnnnnnnnnnnnnnnnnnnnnnnnnnnnnnnnnnnnnnnnnnnnnnnnnnnnnnnnnnnnnnnnnnnnnnnnnnnnnnnnnnnnnnnnnnnnnnnnnnnnnnnnnnnnnnnnnnnnnnnnnnnnnnnnnnnnnnnnnnnnnnnnnnnnnnnnnnnnnnnnnnnnnnnnnnnnnnnnnnnnnnnnnnnnnnnnnnnnnnnnnnnnnnnnnnnnnnnnnnnnnnnnnnnnnnnnnnnnnnnnnnnnnnnnnnnnnnnnnnnnnnnnnnnnnnnnnnnnnnnnnnnnnnnnnnnnnnnnnnnnnnnnnnnnnnnnnnnnnnnnnnnnnnnnnnnnnnnnnnnnnnnnnnnnnnnnnnnnnnnnnnnnnnnnnnnnnnnnnnnnnnnnnnnnnnnnnnnnnnnnnnnnnnnnnnnnnnnnnnnnnnnnnnnnnnnnnnnnnnnnnnnnnnnnnnnnnnnnnnnnnnnnnnnnnnnnnnnnnnnnnnnnnnnnnnnnnnnnnnnnnnnnnnnnnnnnnnnnnnnnnnnnnnnnnnnnnnnnnnnnnnnnnnnnnnnnnnnnnnnnnnnnnnnnnnnnnnnnnnnnnnnnnnnnnnnnnnnnnnnnnnnnnnnnnnnnnnnnnnnnnnnnnnnnnnnnnnnnnnnnnnnnnnnnnnnnnnnnnnnnnnnnnnnnnnnnnnnnnnnnnnnnnnnnnnnnnnnnnnnnnnnnnnnnnnnnnnnnnnnnnnnnnnnnnnnnnnnnnnnnnnnnnnnnnnnnnnnnnnnnnnnnnnnnnnnnnnnnnnnnnnnnnnnnnnnnnnnnnnnnnnnnnnnnnnnnnnnnnnnnnnnnnnnnnnnnnnnnnnnnnnnnnnnnnnnnnnnnnnnnnnnnnnnnnnnnnnnnnnnnnnnnnnnnnnnnnnnnnnnnnnnnnnnnnnnnnnnnnnnnnnnnnnnnnnnnnnnnnnnnnnnnnnnnnnnnnnnnnnnnnnnnnnnnnnnnnnnnnnnnnnnnnnnnnnnnnnnnnnnnnnnnnnnnnnnnnnnnnnnnnnnnnnnnnnnnnnnnnnnnnnnnnnnnnnnnnnnnnnnnnnnnnnnnnnnnnnnnnnnnnnnnnnnnnnnnnnnnnnnnnnnnnnnnnnnnnnnnnnnnnnnnnnnnnnnnnnnnnnnnnnnnnnnnnnnnnnnnnnnnnnnnnnnnnnnnnnnnnnnnnnnnnnnnnnnnnnnnnnnnnnnnnnnnnnnnnnnnnnnnnnnnnnnnnnnnnnnnnnnnnnnnnnnnnnnnnnnnnnnnnnnnnnnnnnnnnnnnnnnnnnnnnnnnnnnnnnnnnnnnnnnnnnnnnnnnnnnnnnnnnnnnnnnnnnnnnnnnnnnnnnnnnnnnnnnnnnnnnnnnnnnnnnnnnnnnnnnnnnnnnnnnnnnnnnnnnnnnnnnnnnnnnnnnnnnnnnnnnnnnnnnnnnnnnnnnnnnnnnnnnnnnnnnnnnnnnnnnnnnnnnnnnnnnnnnnnnnnnnnnnnnnnnnnnnnnnnnnnnnnnnnnnnnnnnnnnnnnnnnnnnnnnnnnnnnnnnnnnnnnnnnnnnnnnnnnnnnnnnnnnnnnnnnnnnnnnnnnnnnnnnnnnnnnnnnnnnnnnnnnnnnnnnnnnnnnnnnnnnnnnnnnnnnnnnnnnnnnnnnnnnnnnnnnnnnnnnnnnnnnnnnnnnnnnnnnnnnnnnnnnnnnnnnnnnnnnnnnnnnnnnnnnnnnnnnnnnnnnnnnnnnnnnnnnnnnnnnnnnnnnnnnnnnnnnnnnnnnnnnnnnnnnnnnnnnnnnnnnnnnnnnnnnnnnnnnnnnnnnnnnnnnnnnnnnnnnnnnnnnnnnnnnnnnnnnnnnnnnnnnnnnnnnnnnnnnnnnnnnnnnnnnnnnnnnnnnnnnnnnnnnnnnnnnnnnnnnnnnnnnnnnnnnnnnnnnnnnnnnnnnnnnnnnnnnnnnnnnnnnnnnnnnnnnnnnnnnnnnnnnnnnnnnnnnnnnnnnnnnnnnnnnnnnnnnnnnnnnnnnnnnnnnnnnnnnnnnnnnnnnnnnnnnnnnnnnnnnnnnnnnnnnnnnnnnnnnnnnnnnnnnnnnnnnnnnnnnnnnnnnnnnnnnnnnnnnnnnnnnnnnnnnnnnnnnnnnnnnnnnnnnnnnnnnnnnnnnnnnnnnnnnnnnnnnnnnnnnnnnnnnnnnnnnnnnnnnnnnnnnnnnnnnnnnnnnnnnnnnnnnnnnnnnnnnnnnnnnnnnnnnnnnnnnnnnnnnnnnnnnnnnnnnnnnnnnnnnnnnnnnnnnnnnnnnnnnnnnnnnnnnnnnnnnnnnnnnnnnnnnnnnnnnnnnnnnnnnnnnnnnnnnnnnnnnnnnnnnnnnnnnnnnnnnnnnnnnnnnnnnnnnnnnnnnnnnnnnnnnnnnnnnnnnnnnnnnnnnnnnnnnnnnnnnnnnnnnnnnnnnnnnnnnnnnnnnnnnnnnnnnnnnnnnnnnnnnnnnnnnnnnnnnnnnnnnnnnnnnnnnnnnnnnnnnnnnnnnnnnnnnnnnnnnnnnnnnnnnnnnnnnnnnnnnnnnnnnnnnnnnnnnnnnnnnnnnnnnnnnnnnnnnnnnnnnnnnnnnnnnnnnnnnnnnnnnnnnnnnnnnnnnnnnnnnnnnnnnnnnnnnnnnnnnnnnnnnnnnnnnnnnnnnnnnnnnnnnnnnnnnnnnnnnnnnnnnnnnnnnnnnnnnnnnnnnnnnnnnnnnnnnnnnnnnnnnnnnnnnnnnnnnnnnnnnnnnnnnnnnnnnnnnnnnnnnnnnnnnnnnnnnnnnnnnnnnnnnnnnnnnnnnnnnnnnnnnnnnnnnnnnnnnnnnnnnnnnnnnnnnnnnnnnnnnnnnnnnnnnnnnnnnnnnnnnnnnnnnnnnnnnnnnnnnnnnnnnnnnnnnnnnnnnnnnnnnnnnnnnnnnnnnnnnnnnnnnnnnnnnnnnnnnnnnnnnnnnnnnnnnnnnnnnnnnnnnnnnnnnnnnnnnnnnnnnnnnnnnnnnnnnnnnnnnnnnnnnnnnnnnnnnnnnnnnnnnnnnnnnnnnnnnnnnnnnnnnnnnnnnnnnnnnnnnnnnnnnnnnnnnnnnnnnnnnnnnnnnnnnnnnnnnnnnnnnnnnnnnnnnnnnnnnnnnnnnnnnnnnnnnnnnnnnnnnnnnnnnnnnnnnnnnnnnnnnnnnnnnnnnnnnnnnnnnnnnnnnnnnnnnnnnnnnnnnnnnnnnnnnnnnnnnnnnnnnnnnnnnnnnnnnnnnnnnnnnnnnnnnnnnnnnnnnnnnnnnnnnnnnnnnnnnnnnnnnnnnnnnnnnnnnnnnnnnnnnnnnnnnnnnnnnnnnnnnnnnnnnnnnnnnnnnnnnnnnnnnnnnnnnnnnnnnnnnnnnnnnnnnnnnnnnnnnnnnnnnnnnnnnnnnnnnnnnnnnnnnnnnnnnnnnnnnnnnnnnnnnnnnnnnnnnnnnnnnnnnnnnnnnnnnnnnnnnnnnnnnnnnnnnnnnnnnnnnnnnnnnnnnnnnnnnnnnnnnnnnnnnnnnnnnnnnnnnnnnnnnnnnnnnnnnnnnnnnnnnnnnnnnnnnnnnnnnnnnnnnnnnnnnnnnnnnnnnnnnnnnnnnnnnnnnnnnnnnnnnnnnnnnnnnnnnnnnnnnnnnnnnnnnnnnnnnnnnnnnnnnnnnnnnnnnnnnnnnnnnnnnnnnnnnnnnnnnnnnnnnnnnnnnnnnnnnnnnnnnnnnnnnnnnnnnnnnnnnnnnnnnnnnnnnnnnnnnnnnnnnnnnnnnnnnnnnnnnnnnnnnnnnnnnnnnnnnnnnnnnnnnnnnnnnnnnnnnnnnnnnnnnnnnnnnnnnnnnnnnnnnnnnnnnnnnnnnnnnnnnnnnnnnnnnnnnnnnnnnnnnnnnnnnnnnnnnnnnnnnnnnnnnnnnnnnnnnnnnnnnnnnnnnnnnnnnnnnnnnnnnnnnnnnnnnnnnnnnnnnnnnnnnnnnnnnnnnnnnnnnnnnnnnnnnnnnnnnnnnnnnnnnnnnnnnnnnnnnnnnnnnnnnnnnnnnnnnnnnnnnnnnnnnnnnnnnnnnnnnnnnnnnnnnnnnnnnnnnnnnnnnnnnnnnnnnnnnnnnnnnnnnnnnnnnnnnnnnnnnnnnnnnnnnnnnnnnnnnnnnnnnnnnnnnnnnnnnnnnnnnnnnnnnnnnnnnnnnnnnnnnnnnnnnnnnnnnnnnnnnnnnnnnnnnnnnnnnnnnnnnnnnnnnnnnnnnnnnnnnnnnnnnnnnnnnnnnnnnnnnnnnnnnnnnnnnnnnnnnnnnnnnnnnnnnnnnnnnnnnnnnnnnnnnnnnnnnnnnnnnnnnnnnnnnnnnnnnnnnnnnnnnnnnnnnnnnnnnnnnnnnnnnnnnnnnnnnnnnnnnnnnnnnnnnnnnnnnnnnnnnnnnnnnnnnnnnnnnnnnnnnnnnnnnnnnnnnnnnnnnnnnnnnnnnnnnnnnnnnnnnnnnnnnnnnnnnnnnnnnnnnnnnnnnnnnnnnnnnnnnnnnnnnnnnnnnnnnnnnnnnnnnnnnnnnnnnnnnnnnnnnnnnnnnnnnnnnnnnnnnnnnnnnnnnnnnnnnnnnnnnnnnnnnnnnnnnnnnnnnnnnnnnnnnnnnnnnnnnnnnnnnnnnnnnnnnnnnnnnnnnnnnnnnnnnnnnnnnnnnnnnnnnnnnnnnnnnnnnnnnnnnnnnnnnnnnnnnnnnnnnnnnnnnnnnnnnnnnnnnnnnnnnnnnnnnnnnnnnnnnnnnnnnnnnnnnnnnnnnnnnnnnnnnnnnnnnnnnnnnnnnnnnnnnnnnnnnnnnnnnnnnnnnnnnnnnnnnnnnnnnnnnnnnnnnnnnnnnnnnnnnnnnnnnnnnnnnnnnnnnnnnnnnnnnnnnnnnnnnnnnnnnnnnnnnnnnnnnnnnnnnnnnnnnnnnnnnnnnnnnnnnnnnnnnnnnnnnnnnnnnnnnnnnnnnnnnnnnnnnnnnnnnnnnnnnnnnnnnnnnnnnnnnnnnnnnnnnnnnnnnnnnnnnnnnnnnnnnnnnnnnnnnnnnnnnnnnnnnnnnnnnnnnnnnnnnnnnnnnnnnnnnnnnnnnnnnnnnnnnnnnnnnnnnnnnnnnnnnnnnnnnnnnnnnnnnnnnnnnnnnnnnnnnnnnnnnnnnnnnnnnnnnnnnnnnnnnnnnnnnnnnnnnnnnnnnnnnnnnnnnnnnnnnnnnnnnnnnnnnnnnnnnnnnnnnnnnnnnnnnnnnnnnnnnnnnnnnnnnnnnnnnnnnnnnnnnnnnnnnnnnnnnnnnnnnnnnnnnnnnnnnnnnnnnnnnnnnnnnnnnnnnnnnnnnnnnnnnnnnnnnnnnnnnnnnnnnnnnnnnnnnnnnnnnnnnnnnnnnnnnnnnnnnnnnnnnnnnnnnnnnnnnnnnnnnnnnnnnnnnnnnnnnnnnnnnnnnnnnnnnnnnnnnnnnnnnnnnnnnnnnnnnnnnnnnnnnnnnnnnnnnnnnnnnnnnnnnnnnnnnnnnnnnnnnnnnnnnnnnnnnnnnnnnnnnnnnnnnnnnnnnnnnnnnnnnnnnnnnnnnnnnnnnnnnnnnnnnnnnnnnnnnnnnnnnnnnnnnnnnnnnnnnnnnnnnnnnnnnnnnnnnnnnnnnnnnnnnnnnnnnnnnnnnnnnnnnnnnnnnnnnnnnnnnnnnnnnnnnnnnnnnnnnnnnnnnnnnnnnnnnnnnnnnnnnnnnnnnnnnnnnnnnnnnnnnnnnnnnnnnnnnnnnnnnnnnnnnnnnnnnnnnnnnnnnnnnnnnnnnnnnnnnnnnnnnnnnnnnnnnnnnnnnnnnnnnnnnnnnnnnnnnnnnnnnnnnnnnnnnnnnnnnnnnnnnnnnnnnnnnnnnnnnnnnnnnnnnnnnnnnnnnnnnnnnnnnnnnnnnnnnnnnnnnnnnnnnnnnnnnnnnnnnnnnnnnnnnnnnnnnnnnnnnnnnnnnnnnnnnnnnnnnnnnnnnnnnnnnnnnnnnnnnnnnnnnnnnnnnnnnnnnnnnnnnnnnnnnnnnnnnnnnnnnnnnnnnnnnnnnnnnnnnnnnnnnnnnnnnnnnnnnnnnnnnnnnnnnnnnnnnnnnnnnnnnnnnnnnnnnnnnnnnnnnnnnnnnnnnnnnnnnnnnnnnnnnnnnnnnnnnnnnnnnnnnnnnnnnnnnnnnnnnnnnnnnnnnnnnnnnnnnnnnnnnnnnnnnnnnnnnnnnnnnnnnnnnnnnnnnnnnnnnnnnnnnnnnnnnnnnnnnnnnnnnnnnnnnnnnnnnnnnnnnnnnnnnnnnnnnnnnnnnnnnnnnnnnnnnnnnnnnnnnnnnnnnnnnnnnnnnnnnnnnnnnnnnnnnnnnnnnnnnnnnnnnnnnnnnnnnnnnnnnnnnnnnnnnnnnnnnnnnnnnnnnnnnnnnnnnnnnnnnnnnnnnnnnnnnnnnnnnnnnnnnnnnnnnnnnnnnnnnnnnnnnnnnnnnnnnnnnnnnnnnnnnnnnnnnnnnnnnnnnnnnnnnnnnnnnnnnnnnnnnnnnnnnnnnnnnnnnnnnnnnnnnnnnnnnnnnnnnnnnnnnnnnnnnnnnnnnnnnnnnnnnnnnnnnnnnnnnnnnnnnnnnnnnnnnnnnnnnnnnnnnnnnnnnnnnnnnnnnnnnnnnnnnnnnnnnnnnnnnnnnnnnnnnnnnnnnnnnnnnnnnnnnnnnnnnnnnnnnnnnnnnnnnnnnnnnnnnnnnnnnnnnnnnnnnnnnnnnnnnnnnnnnnnnnnnnnnnnnnnnnnnnnnnnnnnnnnnnnnnnnnnnnnnnnnnnnnnnnnnnnnnnnnnnnnnnnnnnnnnnnnnnnnnnnnnnnnnnnnnnnnnnnnnnnnnnnnnnnnnnnnnnnnnnnnnnnnnnnnnnnnnnnnnnnnnnnnnnnnnnnnnnnnnnnnnnnnnnnnnnnnnnnnnnnnnnnnnnnnnnnnnnnnnnnnnnnnnnnnnnnnnnnnnnnnnnnnnnnnnnnnnnnnnnnnnnnnnnnnnnnnnnnnnnnnnnnnnnnnnnnnnnnnnnnnnnnnnnnnnnnnnnnnnnnnnnnnnnnnnnnnnnnnnnnnnnnnnnnnnnnnnnnnnnnnnnnnnnnnnnnnnnnnnnnnnnnnnnnnnnnnnnnnnnnnnnnnnnnnnnnnnnnnnnnnnnnnnnnnnnnnnnnnnnnnnnnnnnnnnnnnnnnnnnnnnnnnnnnnnnnnnnnnnnnnnnnnnnnnnnnnnnnnnnnnnnnnnnnnnnnnnnnnnnnnnnnnnnnnnnnnnnnnnnnnnnnnnnnnnnnnnnnnnnnnnnnnnnnnnnnnnnnnnnnnnnnnnnnnnnnnnnnnnnnnnnnnnnnnnnnnnnnnnnnnnnnnnnnnnnnnnnnnnnnnnnnnnnnnnnnnnnnnnnnnnnnnnnnnnnnnnnnnnnnnnnnnnnnnnnnnnnnnnnnnnnnnnnnnnnnnnnnnnnnnnnnnnnnnnnnnnnnnnnnnnnnnnnnnnnnnnnnnnnnnnnnnnnnnnnnnnnnnnnnnnnnnnnnnnnnnnnnnnnnnnnnnnnnnnnnnnnnnnnnnnnnnnnnnnnnnnnnnnnnnnnnnnnnnnnnnnnnnnnnnnnnnnnnnnnnnnnnnnnnnnnnnnnnnnnnnnnnnnnnnnnnnnnnnnnnnnnnnnnnnnnnnnnnnnnnnnnnnnnnnnnnnnnnnnnnnnnnnnnnnnnnnnnnnnnnnnnnnnnnnnnnnnnnnnnnnnnnnnnnnnnnnnnnnnnnnnnnnnnnnnnnnnnnnnnnnnnnnnnnnnnnnnnnnnnnnnnnnnnnnnnnnnnnnnnnnnnnnnnnnnnnnnnnnnnnnnnnnnnnnnnnnnnnnnnnnnnnnnnnnnnnnnnnnnnnnnnnnnnnnnnnnnnnnnnnnnnnnnnnnnnnnnnnnnnnnnnnnnnnnnnnnnnnnnnnnnnnnnnnnnnnnnnnnnnnnnnnnnnnnnnnnnnnnnnnnnnnnnnnnnnnnnnnnnnnnnnnnnnnnnnnnnnnnnnnnnnnnnnnnnnnnnnnnnnnnnnnnnnnnnnnnnnnnnnnnnnnnnnnnnnnnnnnnnnnnnnnnnnnnnnnnnnnnnnnnnnnnnnnnnnnnnnnnnnnnnnnnnnnnnnnnnnnnnnnnnnnnnnnnnnnnnnnnnnnnnnnnnnnnnnnnnnnnnnnnnnnnnnnnnnnnnnnnnnnnnnnnnnnnnnnnnnnnnnnnnnnnnnnnnnnnnnnnnnnnnnnnnnnnnnnnnnnnnnnnnnnnnnnnnnnnnnnnnnnnnnnnnnnnnnnnnnnnnnnnnnnnnnnnnnnnnnnnnnnnnnnnnnnnnnnnnnnnnnnnnnnnnnnnnnnnnnnnnnnnnnnnnnnnnnnnnnnnnnnnnnnnnnnnnnnnnnnnnnnnnnnnnnnnnnnnnnnnnnnnnnnnnnnnnnnnnnnnnnnnnnnnnnnnnnnnnnnnnnnnnnnnnnnnnnnnnnnnnnnnnnnnnnnnnnnnnnnnnnnnnnnnnnnnnnnnnnnnnnnnnnnnnnnnnnnnnnnnnnnnnnnnnnnnnnnnnnnnnnnnnnnnnnnnnnnnnnnnnnnnnnnnnnnnnnnnnnnnnnnnnnnnnnnnnnnnnnnnnnnnnnnnnnnnnnnnnnnnnnnnnnnnnnnnnnnnnnnnnnnnnnnnnnnnnnnnnnnnnnnnnnnnnnnnnnnnnnnnnnnnnnnnnnnnnnnnnnnnnnnnnnnnnnnnnnnnnnnnnnnnnnnnnnnnnnnnnnnnnnnnnnnnnnnnnnnnnnnnnnnnnnnnnnnnnnnnnnnnnnnnnnnnnnnnnnnnnnnnnnnnnnnnnnnnnnnnnnnnnnnnnnnnnnnnnnnnnnnnnnnnnnnnnnnnnnnnnnnnnnnnnnnnnnnnnnnnnnnnnnnnnnnnnnnnnnnnnnnnnnnnnnnnnnnnnnnnnnnnnnnnnnnnnnnnnnnnnnnnnnnnnnnnnnnnnnnnnnnnnnnnnnnnnnnnnnnnnnnnnnnnnnnnnnnnnnnnnnnnnnnnnnnnnnnnnnnnnnnnnnnnnnnnnnnnnnnnnnnnnnnnnnnnnnnnnnnnnnnnnnnnnnnnnnnnnnnnnnnnnnnnnnnnnnnnnnnnnnnnnnnnnnnnnnnnnnnnnnnnnnnnnnnnnnnnnnnnnnnnnnnnnnnnnnnnnnnnnnnnnnnnnnnnnnnnnnnnnnnnnnnnnnnnnnnnnnnnnnnnnnnnnnnnnnnnnnnnnnnnnnnnnnnnnnnnnnnnnnnnnnnnnnnnnnnnnnnnnnnnnnnnnnnnnnnnnnnnnnnnnnnnnnnnnnnnnnnnnnnnnnnnnnnnnnnnnnnnnnnnnnnnnnnnnnnnnnnnnnnnnnnnnnnnnnnnnnnnnnnnnnnnnnnnnnnnnnnnnnnnnnnnnnnnnnnnnnnnnnnnnnnnnnnnnnnnnnnnnnnnnnnnnnnnnnnnnnnnnnnnnnnnnnnnnnnnnnnnnnnnnnnnnnnnnnnnnnnnnnnnnnnnnnnnnnnnnnnnnnnnnnnnnnnnnnnnnnnnnnnnnnnnnnnnnnnnnnnnnnnnnnnnnnnnnnnnnnnnnnnnnnnnnnnnnnnnnnnnnnnnnnnnnnnnnnnnnnnnnnnnnnnnnnnnnnnnnnnnnnnnnnnnnnnnnnnnnnnnnnnnnnnnnnnnnnnnnnnnnnnnnnnnnnnnnnnnnnnnnnnnnnnnnnnnnnnnnnnnnnnnnnnnnnnnnnnnnnnnnnnnnnnnnnnnnnnnnnnnnnnnnnnnnnnnnnnnnnnnnnnnnnnnnnnnnnnnnnnnnnnnnnnnnnnnnnnnnnnnnnnnnnnnnnnnnnnnnnnnnnnnnnnnnnnnnnnnnnnnnnnnnnnnnnnnnnnnnnnnnnnnnnnnnnnnnnnnnnnnnnnnnnnnnnnnnnnnnnnnnnnnnnnnnnnnnnnnnnnnnnnnnnnnnnnnnnnnnnnnnnnnnnnnnnnnnnnnnnnnnnnnnnnnnnnnnnnnnnnnnnnnnnnnnnnnnnnnnnnnnnnnnnnnnnnnnnnnnnnnnnnnnnnnnnnnnnnnnnnnnnnnnnnnnnnnnnnnnnnnnnnnnnnnnnnnnnnnnnnnnnnnnnnnnnnnnnnnnnnnnnnnnnnnnnnnnnnnnnnnnnnnnnnnnnnnnnnnnnnnnnnnnnnnnnnnnnnnnnnnnnnnnnnnnnnnnnnnnnnnnnnnnnnnnnnnnnnnnnnnnnnnnnnnnnnnnnnnnnnnnnnnnnnnnnnnnnnnnnnnnnnnnnnnnnnnnnnnnnnnnnnnnnnnnnnnnnnnnnnnnnnnnnnnnnnnnnnnnnnnnnnnnnnnnnnnnnnnnnnnnnnnnnnnnnnnnnnnnnnnnnnnnnnnnnnnnnnnnnnnnnnnnnnnnnnnnnnnnnnnnnnnnnnnnnnnnnnnnnnnnnnnnnnnnnnnnnnnnnnnnnnnnnnnnnnnnnnnnnnnnnnnnnnnnnnnnnnnnnnnnnnnnnnnnnnnnnnnnnnnnnnnnnnnnnnnnnnnnnnnnnnnnnnnnnnnnnnnnnnnnnnnnnnnnnnnnnnnnnnnnnnnnnnnnnnnnnnnnnnnnnnnnnnnnnnnnnnnnnnnnnnnnnnnnnnnnnnnnnnnnnnnnnnnnnnnnnnnnnnnnnnnnnnnnnnnnnnnnnnnnnnnnnnnnnnnnnnnnnnnnnnnnnnnnnnnnnnnnnnnnnnnnnnnnnnnnnnnnnnnnnnnnnnnnnnnnnnnnnnnnnnnnnnnnnnnnnnnnnnnnnnnnnnnnnnnnnnnnnnnnnnnnnnnnnnnnnnnnnnnnnnnnnnnnnnnnnnnnnnnnnnnnnnnnnnnnnnnnnnnnnnnnnnnnnnnnnnnnnnnnnnnnnnnnnnnnnnnnnnnnnnnnnnnnnnnnnnnnnnnnnnnnnnnnnnnnnnnnnnnnnnnnnnnnnnnnnnnnnnnnnnnnnnnnnnnnnnnnnnnnnnnnnnnnnnnnnnnnnnnnnnnnnnnnnnnnnnnnnnnnnnnnnnnnnnnnnnnnnnnnnnnnnnnnnnnnnnnnnnnnnnnnnnnnnnnnnnnnnnnnnnnnnnnnnnnnnnnnnnnnnnnnnnnnnnnnnnnnnnnnnnnnnnnnnnnnnnnnnnnnnnnnnnnnnnnnnnnnnnnnnnnnnnnnnnnnnnnnnnnnnnnnnnnnnnnnnnnnnnnnnnnnnnnnnnnnnnnnnnnnnnnnnnnnnnnnnnnnnnnnnnnnnnnnnnnnnnnnnnnnnnnnnnnnnnnnnnnnnnnnnnnnnnnnnnnnnnnnnnnnnnnnnnnnnnnnnnnnnnnnnnnnnnnnnnnnnnnnnnnnnnnnnnnnnnnnnnnnnnnnnnnnnnnnnnnnnnnnnnnnnnnnnnnnnnnnnnnnnnnnnnnnnnnnnnnnnnnnnnnnnnnnnnnnnnnnnnnnnnnnnnnnnnnnnnnnnnnnnnnnnnnnnnnnnnnnnnnnnnnnnnnnnnnnnnnnnnnnnnnnnnnnnnnnnnnnnnnnnnnnnnnnnnnnnnnnnnnnnnnnnnnnnnnnnnnnnnnnnnnnnnnnnnnnnnnnnnnnnnnnnnnnnnnnnnnnnnnnnnnnnnnnnnnnnnnnnnnnnnnnnnnnnnnnnnnnnnnnnnnnnnnnnnnnnnnnnnnnnnnnnnnnnnnnnnnnnnnnnnnnnnnnnnnnnnnnnnnnnnnnnnnnnnnnnnnnnnnnnnnnnnnnnnnnnnnnnnnnnnnnnnnnnnnnnnnnnnnnnnnnnnnnnnnnnnnnnnnnnnnnnnnnnnnnnnnnnnnnnnnnnnnnnnnnnnnnnnnnnnnnnnnnnnnnnnnnnnnnnnnnnnnnnnnnnnnnnnnnnnnnnnnnnnnnnnnnnnnnnnnnnnnnnnnnnnnnnnnnnnnnnnnnnnnnnnnnnnnnnnnnnnnnnnnnnnnnnnnnnnnnnnnnnnnnnnnnnnnnnnnnnnnnnnnnnnnnnnnnnnnnnnnnnnnnnnnnnnnnnnnnnnnnnnnnnnnnnnnnnnnnnnnnnnnnnnnnnnnnnnnnnnnnnnnnnnnnnnnnnnnnnnnnnnnnnnnnnnnnnnnnnnnnnnnnnnnnnnnnnnnnnnnnnnnnnnnnnnnnnnnnnnnnnnnnnnnnnnnnnnnnnnnnnnnnnnnnnnnnnnnnnnnnnnnnnnnnnnnnnnnnnnnnnnnnnnnnnnnnnnnnnnnnnnnnnnnnnnnnnnnnnnnnnnnnnnnnnnnnnnnnnnnnnnnnnnnnnnnnnnnnnnnnnnnnnnnnnnnnnnnnnnnnnnnnnnnnnnnnnnnnnnnnnnnnnnnnnnnnnnnnnnnnnnnnnnnnnnnnnnnnnnnnnnnnnnnnnnnnnnnnnnnnnnnnnnnnnnnnnnnnnnnnnnnnnnnnnnnnnnnnnnnnnnnnnnnnnnnnnnnnnnnnnnnnnnnnnnnnnnnnnnnnnnnnnnnnnnnnnnnnnnnnnnnnnnnnnnnnnnnnnnnnnnnnnnnnnnnnnnnnnnnnnnnnnnnnnnnnnnnnnnnnnnnnnnnnnnnnnnnnnnnnnnnnnnnnnnnnnnnnnnnnnnnnnnnnnnnnnnnnnnnnnnnnnnnnnnnnnnnnnnnnnnnnnnnnnnnnnnnnnnnnnnnnnnnnnnnnnnnnnnnnnnnnnnnnnnnnnnnnnnnnnnnnnnnnnnnnnnnnnnnnnnnnnnnnnnnnnnnnnnnnnnnnnnnnnnnnnnnnnnnnnnnnnnnnnnnnnnnnnnnnnnnnnnnnnnnnnnnnnnnnnnnnnnnnnnnnnnnnnnnnnnnnnnnnnnnnnnnnnnnnnnnnnnnnnnnnnnnnnnnnnnnnnnnnnnnnnnnnnnnnnnnnnnnnnnnnnnnnnnnnnnnnnnnnnnnnnnnnnnnnnnnnnnnnnnnnnnnnnnnnnnnnnnnnnnnnnnnnnnnnnnnnnnnnnnnnnnnnnnnnnnnnnnnnnnnnnnnnnnnnnnnnnnnnnnnnnnnnnnnnnnnnnnnnnnnnnnnnnnnnnnnnnnnnnnnnnnnnnnnnnnnnnnnnnnnnnnnnnnnnnnnnnnnnnnnnnnnnnnnnnnnnnnnnnnnnnnnnnnnnnnnnnnnnnnnnnnnnnnnnnnnnnnnnnnnnnnnnnnnnnnnnnnnnnnnnnnnnnnnnnnnnnnnnnnnnnnnnnnnnnnnnnnnnnnnnnnnnnnnnnnnnnnnnnnnnnnnnnnnnnnnnnnnnnnnnnnnnnnnnnnnnnnnnnnnnnnnnnnnnnnnnnnnnnnnnnnnnnnnnnnnnnnnnnnnnnnnnnnnnnnnnnnnnnnnnnnnnnnnnnnnnnnnnnnnnnnnnnnnnnnnnnnnnnnnnnnnnnnnnnnnnnnnnnnnnnnnnnnnnnnnnnnnnnnnnnnnnnnnnnnnnnnnnnnnnnnnnnnnnnnnnnnnnnnnnnnnnnnnnnnnnnnnnnnnnnnnnnnnnnnnnnnnnnnnnnnnnnnnnnnnnnnnnnnnnnnnnnnnnnnnnnnnnnnnnnnnnnnnnnnnnnnnnnnnnnnnnnnnnnnnnnnnnnnnnnnnnnnnnnnnnnnnnnnnnnnnnnnnnnnnnnnnnnnnnnnnnnnnnnnnnnnnnnnnnnnnnnnnnnnnnnnnnnnnnnnnnnnnnnnnnnnnnnnnnnnnnnnnnnnnnnnnnnnnnnnnnnnnnnnnnnnnnnnnnnnnnnnnnnnnnnnnnnnnnnnnnnnnnnnnnnnnnnnnnnnnnnnnnnnnnnnnnnnnnnnnnnnnnnnnnnnnnnnnnnnnnnnnnnnnnnnnnnnnnnnnnnnnnnnnnnnnnnnnnnnnnnnnnnnnnnnnnnnnnnnnnnnnnnnnnnnnnnnnnnnnnnnnnnnnnnnnnnnnnnnnnnnnnnnnnnnnnnnnnnnnnnnnnnnnnnnnnnnnnnnnnnnnnnnnnnnnnnnnnnnnnnnnnnnnnnnnnnnnnnnnnnnnnnnnnnnnnnnnnnnnnnnnnnnnnnnnnnnnnnnnnnnnnnnnnnnnnnnnnnnnnnnnnnnnnnnnnnnnnnnnnnnnnnnnnnnnnnnnnnnnnnnnnnnnnnnnnnnnnnnnnnnnnnnnnnnnnnnnnnnnnnnnnnnnnnnnnnnnnnnnnnnnnnnnnnnnnnnnnnnnnnnnnnnnnnnnnnnnnnnnnnnnnnnnnnnnnnnnnnnnnnnnnnnnnnnnnnnnnnnnnnnnnnnnnnnnnnnnnnnnnnnnnnnnnnnnnnnnnnnnnnnnnnnnnnnnnnnnnnnnnnnnnnnnnnnnnnnnnnnnnnnnnnnnnnnnnnnnnnnnnnnnnnnnnnnnnnnnnnnnnnnnnnnnnnnnnnnnnnnnnnnnnnnnnnnnnnnnnnnnnnnnnnnnnnnnnnnnnnnnnnnnnnnnnnnnnnnnnnnnnnnnnnnnnnnnnnnnnnnnnnnnnnnnnnnnnnnnnnnnnnnnnnnnnnnnnnnnnnnnnnnnnnnnnnnnnnnnnnnnnnnnnnnnnnnnnnnnnnnnnnnnnnnnnnnnnnnnnnnnnnnnnnnnnnnnnnnnnnnnnnnnnnnnnnnnnnnnnnnnnnnnnnnnnnnnnnnnnnnnnnnnnnnnnnnnnnnnnnnnnnnnnnnnnnnnnnnnnnnnnnnnnnnnnnnnnnnnnnnnnnnnnnnnnnnnnnnnnnnnnnnnnnnnnnnnnnnnnnnnnnnnnnnnnnnnnnnnnnnnnnnnnnnnnnnnnnnnnnnnnnnnnnnnnnnnnnnnnnnnnnnnnnnnnnnnnnnnnnnnnnnnnnnnnnnnnnnnnnnnnnnnnnnnnnnnnnnnnnnnnnnnnnnnnnnnnnnnnnnnnnnnnnnnnnnnnnnnnnnnnnnnnnnnnnnnnnnnnnnnnnnnnnnnnnnnnnnnnnnnnnnnnnnnnnnnnnnnnnnnnnnnnnnnnnnnnnnnnnnnnnnnnnnnnnnnnnnnnnnnnnnnnnnnnnnnnnnnnnnnnnnnnnnnnnnnnnnnnnnnnnnnnnnnnnnnnnnnnnnnnnnnnnnnnnnnnnnnnnnnnnnnnnnnnnnnnnnnnnnnnnnnnnnnnnnnnnnnnnnnnnnnnnnnnnnnnnnnnnnnnnnnnnnnnnnnnnnnnnnnnnnnnnnnnnnnnnnnnnnnnnnnnnnnnnnnnnnnnnnnnnnnnnnnnnnnnnnnnnnnnnnnnnnnnnnnnnnnnnnnnnnnnnnnnnnnnnnnnnnnnnnnnnnnnnnnnnnnnnnnnnnnnnnnnnnnnnnnnnnnnnnnnnnnnnnnnnnnnnnnnnnnnnnnnnnnnnnnnnnnnnnnnnnnnnnnnnnnnnnnnnnnnnnnnnnnnnnnnnnnnnnnnnnnnnnnnnnnnnnnnnnnnnnnnnnnnnnnnnnnnnnnnnnnnnnnnnnnnnnnnnnnnnnnnnnnnnnnnnnnnnnnnnnnnnnnnnnnnnnnnnnnnnnnnnnnnnnnnnnnnnnnnnnnnnnnnnnnnnnnnnnnnnnnnnnnnnnnnnnnnnnnnnnnnnnnnnnnnnnnnnnnnnnnnnnnnnnnnnnnnnnnnnnnnnnnnnnnnnnnnnnnnnnnnnnnnnnnnnnnnnnnnnnnnnnnnnnnnnnnnnnnnnnnnnnnnnnnnnnnnnnnnnnnnnnnnnnnnnnnnnnnnnnnnnnnnnnnnnnnnnnnnnnnnnnnnnnnnnnnnnnnnnnnnnnnnnnnnnnnnnnnnnnnnnnnnnnnnnnnnnnnnnnnnnnnnnnnnnnnnnnnnnnnnnnnnnnnnnnnnnnnnnnnnnnnnnnnnnnnnnnnnnnnnnnnnnnnnnnnnnnnnnnnnnnnnnnnnnnnnnnnnnnnnnnnnnnnnnnnnnnnnnnnnnnnnnnnnnnnnnnnnnnnnnnnnnnnnnnnnnnnnnnnnnnnnnnnnnnnnnnnnnnnnnnnnnnnnnnnnnnnnnnnnnnnnnnnnnnnnnnnnnnnnnnnnnnnnnnnnnnnnnnnnnnnnnnnnnnnnnnnnnnnnnnnnnnnnnnnnnnnnnnnnnnnnnnnnnnnnnnnnnnnnnnnnnnnnnnnnnnnnnnnnnnnnnnnnnnnnnnnnnnnnnnnnnnnnnnnnnnnnnnnnnnnnnnnnnnnnnnnnnnnnnnnnnnnnnnnnnnnnnnnnnnnnnnnnnnnnnnnnnnnnnnnnnnnnnnnnnnnnnnnnnnnnnnnnnnnnnnnnnnnnnnnnnnnnnnnnnnnnnnnnnnnnnnnnnnnnnnnnnnnnnnnnnnnnnnnnnnnnnnnnnnnnnnnnnnnnnnnnnnnnnnnnnnnnnnnnnnnnnnnnnnnnnnnnnnnnnnnnnnnnnnnnnnnnnnnnnnnnnnnnnnnnnnnnnnnnnnnnnnnnnnnnnnnnnnnnnnnnnnnnnnnnnnnnnnnnnnnnnnnnnnnnnnnnnnnnnnnnnnnnnnnnnnnnnnnnnnnnnnnnnnnnnnnnnnnnnnnnnnnnnnnnnnnnnnnnnnnnnnnnnnnnnnnnnnnnnnnnnnnnnnnnnnnnnnnnnnnnnnnnnnnnnnnnnnnnnnnnnnnnnnnnnnnnnnnnnnnnnnnnnnnnnnnnnnnnnnnnnnnnnnnnnnnnnnnnnnnnnnnnnnnnnnnnnnnnnnnnnnnnnnnnnnnnnnnnnnnnnnnnnnnnnnnnnnnnnnnnnnnnnnnnnnnnnnnnnnnnnnnnnnnnnnnnnnnnnnnnnnnnnnnnnnnnnnnnnnnnnnnnnnnnnnnnnnnnnnnnnnnnnnnnnnnnnnnnnnnnnnnnnnnnnnnnnnnnnnnnnnnnnnnnnnnnnnnnnnnnnnnnnnnnnnnnnnnnnnnnnnnnnnnnnnnnnnnnnnnnnnnnnnnnnnnnnnnnnnnnnnnnnnnnnnnnnnnnnnnnnnnnnnnnnnnnnnnnnnnnnnnnnnnnnnnnnnnnnnnnnnnnnnnnnnnnnnnnnnnnnnnnnnnnnnnnnnnnnnnnnnnnnnnnnnnnnnnnnnnnnnnnnnnnnnnnnnnnnnnnnnnnnnnnnnnnnnnnnnnnnnnnnnnnnnnnnnnnnnnnnnnnnnnnnnnnnnnnnnnnnnnnnnnnnnnnnnnnnnnnnnnnnnnnnnnnnnnnnnnnnnnnnnnnnnnnnnnnnnnnnnnnnnnnnnnnnnnnnnnnnnnnnnnnnnnnnnnnnnnnnnnnnnnnnnnnnnnnnnnnnnnnnnnnnnnnnnnnnnnnnnnnnnnnnnnnnnnnnnnnnnnnnnnnnnnnnnnnnnnnnnnnnnnnnnnnnnnnnnnnnnnnnnnnnnnnnnnnnnnnnnnnnnnnnnnnnnnnnnnnnnnnnnnnnnnnnnnnnnnnnnnnnnnnnnnnnnnnnnnnnnnnnnnnnnnnnnnnnnnnnnnnnnnnnnnnnnnnnnnnnnnnnnnnnnnnnnnnnnnnnnnnnnnnnnnnnnnnnnnnnnnnnnnnnnnnnnnnnnnnnnnnnnnnnnnnnnnnnnnnnnnnnnnnnnnnnnnnnnnnnnnnnnnnnnnnnnnnnnnnnnnnnnnnnnnnnnnnnnnnnnnnnnnnnnnnnnnnnnnnnnnnnnnnnnnnnnnnnnnnnnnnnnnnnnnnnnnnnnnnnnnnnnnnnnnnnnnnnnnnnnnnnnnnnnnnnnnnnnnnnnnnnnnnnnnnnnnnnnnnnnnnnnnnnnnnnnnnnnnnnnnnnnnnnnnnnnnnnnnnnnnnnnnnnnnnnnnnnnnnnnnnnnnnnnnnnnnnnnnnnnnnnnnnnnnnnnnnnnnnnnnnnnnnnnnnnnnnnnnnnnnnnnnnnnnnnnnnnnnnnnnnnnnnnnnnnnnnnnnnnnnnnnnnnnnnnnnnnnnnnnnnnnnnnnnnnnnnnnnnnnnnnnnnnnnnnnnnnnnnnnnnnnnnnnnnnnnnnnnnnnnnnnnnnnnnnnnnnnnnnnnnnnnnnnnnnnnnnnnnnnnnnnnnnnnnnnnnnnnnnnnnnnnnnnnnnnnnnnnnnnnnnnnnnnnnnnnnnnnnnnnnnnnnnnnnnnnnnnnnnnnnnnnnnnnnnnnnnnnnnnnnnnnnnnnnnnnnnnnnnnnnnnnnnnnnnnnnnnnnnnnnnnnnnnnnnnnnnnnnnnnnnnnnnnnnnnnnnnnnnnnnnnnnnnnnnnnnnnnnnnnnnnnnnnnnnnnnnnnnnnnnnnnnnnnnnnnnnnnnnnnnnnnnnnnnnnnnnnnnnnnnnnnnnnnnnnnnnnnnnnnnnnnnnnnnnnnnnnnnnnnnnnnnnnnnnnnnnnnnnnnnnnnnnnnnnnnnnnnnnnnnnnnnnnnnnnnnnnnnnnnnnnnnnnnnnnnnnnnnnnnnnnnnnnnnnnnnnnnnnnnnnnnnnnnnnnnnnnnnnnnnnnnnnnnnnnnnnnnnnnnnnnnnnnnnnnnnnnnnnnnnnnnnnnnnnnnnnnnnnnnnnnnnnnnnnnnnnnnnnnnnnnnnnnnnnnnnnnnnnnnnnnnnnnnnnnnnnnnnnnnnnnnnnnnnnnnnnnnnnnnnnnnnnnnnnnnnnnnnnnnnnnnnnnnnnnnnnnnnnnnnnnnnnnnnnnnnnnnnnnnnnnnnnnnnnnnnnnnnnnnnnnnnnnnnnnnnnnnnnnnnnnnnnnnnnnnnnnnnnnnnnnnnnnnnnnnnnnnnnnnnnnnnnnnnnnnnnnnnnnnnnnnnnnnnnnnnnnnnnnnnnnnnnnnnnnnnnnnnnnnnnnnnnnnnnnnnnnnnnnnnnnnnnnnnnnnnnnnnnnnnnnnnnnnnnnnnnnnnnnnnnnnnnnnnnnnnnnnnnnnnnnnnnnnnnnnnnnnnnnnnnnnnnnnnnnnnnnnnnnnnnnnnnnnnnnnnnnnnnnnnnnnnnnnnnnnnnnnnnnnnnnnnnnnnnnnnnnnnnnnnnnnnnnnnnnnnnnnnnnnnnnnnnnnnnnnnnnnnnnnnnnnnnnnnnnnnnnnnnnnnnnnnnnnnnnnnnnnnnnnnnnnnnnnnnnnnnnnnnnnnnnnnnnnnnnnnnnnnnnnnnnnnnnnnnnnnnnnnnnnnnnnnnnnnnnnnnnnnnnnnnnnnnnnnnnnnnnnnnnnnnnnnnnnnnnnnnnnnnnnnnnnnnnnnnnnnnnnnnnnnnnnnnnnnnnnnnnnnnnnnnnnnnnnnnnnnnnnnnnnnnnnnnnnnnnnnnnnnnnnnnnnnnnnnnnnnnnnnnnnnnnnnnnnnnnnnnnnnnnnnnnnnnnnnnnnnnnnnnnnnnnnnnnnnnnnnnnnnnnnnnnnnnnnnnnnnnnnnnnnnnnnnnnnnnnnnnnnnnnnnnnnnnnnnnnnnnnnnnnnnnnnnnnnnnnnnnnnnnnnnnnnnnnnnnnnnnnnnnnnnnnnnnnnnnnnnnnnnnnnnnnnnnnnnnnnnnnnnnnnnnnnnnnnnnnnnnnnnnnnnnnnnnnnnnnnnnnnnnnnnnnnnnnnnnnnnnnnnnnnnnnnnnnnnnnnnnnnnnnnnnnnnnnnnnnnnnnnnnnnnnnnnnnnnnnnnnnnnnnnnnnnnnnnnnnnnnnnnnnnnnnnnnnnnnnnnnnnnnnnnnnnnnnnnnnnnnnnnnnnnnnnnnnnnnnnnnnnnnnnnnnnnnnnnnnnnnnnnnnnnnnnnnnnnnnnnnnnnnnnnnnnnnnnnnnnnnnnnnnnnnnnnnnnnnnnnnnnnnnnnnnnnnnnnnnnnnnnnnnnnnnnnnnnnnnnnnnnnnnnnnnnnnnnnnnnnnnnnnnnnnnnnnnnnnnnnnnnnnnnnnnnnnnnnnnnnnnnnnnnnnnnnnnnnnnnnnnnnnnnnnnnnnnnnnnnnnnnnnnnnnnnnnnnnnnnnnnnnnnnnnnnnnnnnnnnnnnnnnnnnnnnnnnnnnnnnnnnnnnnnnnnnnnnnnnnnnnnnnnnnnnnnnnnnnnnnnnnnnnnnnnnnnnnnnnnnnnnnnnnnnnnnnnnnnnnnnnnnnnnnnnnnnnnnnnnnnnnnnnnnnnnnnnnnnnnnnnnnnnnnnnnnnnnnnnnnnnnnnnnnnnnnnnnnnnnnnnnnnnnnnnnnnnnnnnnnnnnnnnnnnnnnnnnnnnnnnnnnnnnnnnnnnnnnnnnnnnnnnnnnnnnnnnnnnnnnnnnnnnnnnnnnnnnnnnnnnnnnnnnnnnnnnnnnnnnnnnnnnnnnnnnnnnnnnnnnnnnnnnnnnnnnnnnnnnnnnnnnnnnnnnnnnnnnnnnnnnnnnnnnnnnnnnnnnnnnnnnnnnnnnnnnnnnnnnnnnnnnnnnnnnnnnnnnnnnnnnnnnnnnnnnnnnnnnnnnnnnnnnnnnnnnnnnnnnnnnnnnnnnnnnnnnnnnnnnnnnnnnnnnnnnnnnnnnnnnnnnnnnnnnnnnnnnnnnnnnnnnnnnnnnnnnnnnnnnnnnnnnnnnnnnnnnnnnnnnnnnnnnnnnnnnnnnnnnnnnnnnnnnnnnnnnnnnnnnnnnnnnnnnnnnnnnnnnnnnnnnnnnnnnnnnnnnnnnnnnnnnnnnnnnnnnnnnnnnnnnnnnnnnnnnnnnnnnnnnnnnnnnnnnnnnnnnnnnnnnnnnnnnnnnnnnnnnnnnnnnnnnnnnnnnnnnnnnnnnnnnnnnnnnnnnnnnnnnnnnnnnnnnnnnnnnnnnnnnnnnnnnnnnnnnnnnnnnnnnnnnnnnnnnnnnnnnnnnnnnnnnnnnnnnnnnnnnnnnnnnnnnnnnnnnnnnnnnnnnnnnnnnnnnnnnnnnnnnnnnnnnnnnnnnnnnnnnnnnnnnnnnnnnnnnnnnnnnnnnnnnnnnnnnnnnnnnnnnnnnnnnnnnnnnnnnnnnnnnnnnnnnnnnnnnnnnnnnnnnnnnnnnnnnnnnnnnnnnnnnnnnnnnnnnnnnnnnnnnnnnnnnnnnnnnnnnnnnnnnnnnnnnnnnnnnnnnnnnnnnnnnnnnnnnnnnnnnnnnnnnnnnnnnnnnnnnnnnnnnnnnnnnnnnnnnnnnnnnnnnnnnnnnnnnnnnnnnnnnnnnnnnnnnnnnnnnnnnnnnnnnnnnnnnnnnnnnnnnnnnnnnnnnnnnnnnnnnnnnnnnnnnnnnnnnnnnnnnnnnnnnnnnnnnnnnnnnnnnnnnnnnnnnnnnnnnnnnnnnnnnnnnnnnnnnnnnnnnnnnnnnnnnnnnnnnnnnnnnnnnnnnnnnnnnnnnnnnnnnnnnnnnnnnnnnnnnnnnnnnnnnnnnnnnnnnnnnnnnnnnnnnnnnnnnnnnnnnnnnnnnnnnnnnnnnnnnnnnnnnnnnnnnnnnnnnnnnnnnnnnnnnnnnnnnnnnnnnnnnnnnnnnnnnnnnnnnnnnnnnnnnnnnnnnnnnnnnnnnnnnnnnnnnnnnnnnnnnnnnnnnnnnnnnnnnnnnnnnnnnnnnnnnnnnnnnnnnnnnnnnnnnnnnnnnnnnnnnnnnnnnnnnnnnnnnnnnnnnnnnnnnnnnnnnnnnnnnnnnnnnnnnnnnnnnnnnnnnnnnnnnnnnnnnnnnnnnnnnnnnnnnnnnnnnnnnnnnnnnnnnnnnnnnnnnnnnnnnnnnnnnnnnnnnnnnnnnnnnnnnnnnnnnnnnnnnnnnnnnnnnnnnnnnnnnnnnnnnnnnnnnnnnnnnnnnnnnnnnnnnnnnnnnnnnnnnnnnnnnnnnnnnnnnnnnnnnnnnnnnnnnnnnnnnnnnnnnnnnnnnnnnnnnnnnnnnnnnnnnnnnnnnnnnnnnnnnnnnnnnnnnnnnnnnnnnnnnnnnnnnnnnnnnnnnnnnnnnnnnnnnnnnnnnnnnnnnnnnnnnnnnnnnnnnnnnnnnnnnnnnnnnnnnnnnnnnnnnnnnnnnnnnnnnnnnnnnnnnnnnnnnnnnnnnnnnnnnnnnnnnnnnnnnnnnnnnnnnnnnnnnnnnnnnnnnnnnnnnnnnnnnnnnnnnnnnnnnnnnnnnnnnnnnnnnnnnnnnnnnnnnnnnnnnnnnnnnnnnnnnnnnnnnnnnnnnnnnnnnnnnnnnnnnnnnnnnnnnnnnnnnnnnnnnnnnnnnnnnnnnnnnnnnnnnnnnnnnnnnnnnnnnnnnnnnnnnnnnnnnnnnnnnnnnnnnnnnnnnnnnnnnnnnnnnnnnnnnnnnnnnnnnnnnnnnnnnnnnnnnnnnnnnnnnnnnnnnnnnnnnnnnnnnnnnnnnnnnnnnnnnnnnnnnnnnnnnnnnnnnnnnnnnnnnnnnnnnnnnnnnnnnnnnnnnnnnnnnnnnnnnnnnnnnnnnnnnnnnnnnnnnnnnnnnnnnnnnnnnnnnnnnnnnnnnnnnnnnnnnnnnnnnnnnnnnnnnnnnnnnnnnnnnnnnnnnnnnnnnnnnnnnnnnnnnnnnnnnnnnnnnnnnnnnnnnnnnnnnnnnnnnnnnnnnnnnnnnnnnnnnnnnnnnnnnnnnnnnnnnnnnnnnnnnnnnnnnnnnnnnnnnnnnnnnnnnnnnnnnnnnnnnnnnnnnnnnnnnnnnnnnnnnnnnnnnnnnnnnnnnnnnnnnnnnnnnnnnnnnnnnnnnnnnnnnnnnnnnnnnnnnnnnnnnnnnnnnnnnnnnnnnnnnnnnnnnnnnnnnnnnnnnnnnnnnnnnnnnnnnnnnnnnnnnnnnnnnnnnnnnnnnnnnnnnnnnnnnnnnnnnnnnnnnnnnnnnnnnnnnnnnnnnnnnnnnnnnnnnnnnnnnnnnnnnnnnnnnnnnnnnnnnnnnnnnnnnnnnnnnnnnnnnnnnnnnnnnnnnnnnnnnnnnnnnnnnnnnnnnnnnnnnnnnnnnnnnnnnnnnnnnnnnnnnnnnnnnnnnnnnnnnnnnnnnnnnnnnnnnnnnnnnnnnnnnnnnnnnnnnnnnnnnnnnnnnnnnnnnnnnnnnnnnnnnnnnnnnnnnnnnnnnnnnnnnnnnnnnnnnnnnnnnnnnnnnnnnnnnnnnnnnnnnnnnnnnnnnnnnnnnnnnnnnnnnnnnnnnnnnnnnnnnnnnnnnnnnnnnnnnnnnnnnnnnnnnnnnnnnnnnnnnnnnnnnnnnnnnnnnnnnnnnnnnnnnnnnnnnnnnnnnnnnnnnnnnnnnnnnnnnnnnnnnnnnnnnnnnnnnnnnnnnnnnnnnnnnnnnnnnnnnnnnnnnnnnnnnnnnnnnnnnnnnnnnnnnnnnnnnnnnnnnnnnnnnnnnnnnnnnnnnnnnnnnnnnnnnnnnnnnnnnnnnnnnnnnnnnnnnnnnnnnnnnnnnnnnnnnnnnnnnnnnnnnnnnnnnnnnnnnnnnnnnnnnnnnnnnnnnnnnnnnnnnnnnnnnnnnnnnnnnnnnnnnnnnnnnnnnnnnnnnnnnnnnnnnnnnnnnnnnnnnnnnnnnnnnnnnnnnnnnnnnnnnnnnnnnnnnnnnnnnnnnnnnnnnnnnnnnnnnnnnnnnnnnnnnnnnnnnnnnnnnnnnnnnnnnnnnnnnnnnnnnnnnnnnnnnnnnnnnnnnnnnnnnnnnnnnnnnnnnnnnnnnnnnnnnnnnnnnnnnnnnnnnnnnnnnnnnnnnnnnnnnnnnnnnnnnnnnnnnnnnnnnnnnnnnnnnnnnnnnnnnnnnnnnnnnnnnnnnnnnnnnnnnnnnnnnnnnnnnnnnnnnnnnnnnnnnnnnnnnnnnnnnnnnnnnnnnnnnnnnnnnnnnnnnnnnnnnnnnnnnnnnnnnnnnnnnnnnnnnnnnnnnnnnnnnnnnnnnnnnnnnnnnnnnnnnnnnnnnnnnnnnnnnnnnnnnnnnnnnnnnnnnnnnnnnnnnnnnnnnnnnnnnnnnnnnnnnnnnnnnnnnnnnnnnnnnnnnnnnnnnnnnnnnnnnnnnnnnnnnnnnnnnnnnnnnnnnnnnnnnnnnnnnnnnnnnnnnnnnnnnnnnnnnnnnnnnnnnnnnnnnnnnnnnnnnnnnnnnnnnnnnnnnnnnnnnnnnnnnnnnnnnnnnnnnnnnnnnnnnnnnnnnnnnnnnnnnnnnnnnnnnnnnnnnnnnnnnnnnnnnnnnnnnnnnnnnnnnnnnnnnnnnnnnnnnnnnnnnnnnnnnnnnnnnnnnnnnnnnnnnnnnnnnnnnnnnnnnnnnnnnnnnnnnnnnnnnnnnnnnnnnnnnnnnnnnnnnnnnnnnnnnnnnnnnnnnnnnnnnnnnnnnnnnnnnnnnnnnnnnnnnnnnnnnnnnnnnnnnnnnnnnnnnnnnnnnnnnnnnnnnnnnnnnnnnnnnnnnnnnnnnnnnnnnnnnnnnnnnnnnnnnnnnnnnnnnnnnnnnnnnnnnnnnnnnnnnnnnnnnnnnnnnnnnnnnnnnnnnnnnnnnnnnnnnnnnnnnnnnnnnnnnnnnnnnnnnnnnnnnnnnnnnnnnnnnnnnnnnnnnnnnnnnnnnnnnnnnnnnnnnnnnnnnnnnnnnnnnnnnnnnnnnnnnnnnnnnnnnnnnnnnnnnnnnnnnnnnnnnnnnnnnnnnnnnnnnnnnnnnnnnnnnnnnnnnnnnnnnnnnnnnnnnnnnnnnnnnnnnnnnnnnnnnnnnnnnnnnnnnnnnnnnnnnnnnnnnnnnnnnnnnnnnnnnnnnnnnnnnnnnnnnnnnnnnnnnnnnnnnnnnnnnnnnnnnnnnnnnnnnnnnnnnnnnnnnnnnnnnnnnnnnnnnnnnnnnnnnnnnnnnnnnnnnnnnnnnnnnnnnnnnnnnnnnnnnnnnnnnnnnnnnnnnnnnnnnnnnnnnnnnnnnnnnnnnnnnnnnnnnnnnnnnnnnnnnnnnnnnnnnnnnnnnnnnnnnnnnnnnnnnnnnnnnnnnnnnnnnnnnnnnnnnnnnnnnnnnnnnnnnnnnnnnnnnnnnnnnnnnnnnnnnnnnnnnnnnnnnnnnnnnnnnnnnnnnnnnnnnnnnnnnnnnnnnnnnnnnnnnnnnnnnnnnnnnnnnnnnnnnnnnnnnnnnnnnnnnnnnnnnnnnnnnnnnnnnnnnnnnnnnnnnnnnnnnnnnnnnnnnnnnnnnnnnnnnnnnnnnnnnnnnnnnnnnnnnnnnnnnnnnnnnnnnnnnnnnnnnnnnnnnnnnnnnnnnnnnnnnnnnnnnnnnnnnnnnnnnnnnnnnnnnnnnnnnnnnnnnnnnnnnnnnnnnnnnnnnnnnnnnnnnnnnnnnnnnnnnnnnnnnnnnnnnnnnnnnnnnnnnnnnnnnnnnnnnnnnnnnnnnnnnnnnnnnnnnnnnnnnnnnnnnnnnnnnnnnnnnnnnnnnnnnnnnnnnnnnnnnnnnnnnnnnnnnnnnnnnnnnnnnnnnnnnnnnnnnnnnnnnnnnnnnnnnnnnnnnnnnnnnnnnnnnnnnnnnnnnnnnnnnnnnnnnnnnnnnnnnnnnnnnnnnnnnnnnnnnnnnnnnnnnnnnnnnnnnnnnnnnnnnnnnnnnnnnnnnnnnnnnnnnnnnnnnnnnnnnnnnnnnnnnnnnnnnnnnnnnnnnnnnnnnnnnnnnnnnnnnnnnnnnnnnnnnnnnnnnnnnnnnnnnnnnnnnnnnnnnnnnnnnnnnnnnnnnnnnnnnnnnnnnnnnnnnnnnnnnnnnnnnnnnnnnnnnnnnnnnnnnnnnnnnnnnnnnnnnnnnnnnnnnnnnnnnnnnnnnnnnnnnnnnnnnnnnnnnnnnnnnnnnnnnnnnnnnnnnnnnnnnnnnnnnnnnnnnnnnnnnnnnnnnnnnnnnnnnnnnnnnnnnnnnnnnnnnnnnnnnnnnnnnnnnnnnnnnnnnnnnnnnnnnnnnnnnnnnnnnnnnnnnnnnnnnnnnnnnnnnnnnnnnnnnnnnnnnnnnnnnnnnnnnnnnnnnnnnnnnnnnnnnnnnnnnnnnnnnnnnnnnnnnnnnnnnnnnnnnnnnnnnnnnnnnnnnnnnnnnnnnnnnnnnnnnnnnnnnnnnnnnnnnnnnnnnnnnnnnnnnnnnnnnnnnnnnnnngatccatgggagaagtgtggtttctcagggtcacgtatttgctcaccacttccttgggcagggtaggttccctttggtctgtgttactcccgggtgggcggttgccatgcccttctttttcccatgggttgagctgtttccttcattagtcccactgcaaatatctgggtgtttcagttgatggtgctgtatttattttccctctttgtttcttttcatgaaagccacacaccatagctacttctagtcaaccctcttggcacactttgctacaatatttcagtagatggtttttatcctgtaggctgtctcatggtcccatatggctggctgtaggagcacaagcctgcaccagcaaccatgtccatttcaaaggctaagaagtaggaaagatgcaaggtcaaagtggcttgcacagctgcatcagctccatctgaggaatctccctgaagtcccatcaatacttatggttacaaccaattgtcttgaataggggtcagaaactataacctttgtgtttgtaagttgctgtttgaataaaactaaatttctaattttgtgttttgttttgttttgttttgttttgttttgttttgtttgatggagtctcactctgtcaccaggctggagtgcagtggtgtgattttggctcactgaaacctctgactcttgggttcaagtgattctcctgcctcagcctttcaagtagctgggattacaggtgtgcttgcatcaccatgcccaaaatgctgggattacaggcatgaacaaccacacccagccctgactctctgtttttaagagtgaaagcaaaattaaaactgtggcgatgacaagtgctctttttctacactaaattcaaaggtaaacagaagaagatggaggttttctcaggtgaagtgggcactcatttttcaaacaaagccttttttggtgattatttattttcagatcagatgggaaaaaaatctgggttcttgtaagcactccctttatgaccaaatgttagtcaagcttaactgaaccctctttttgactaagccaaccttgacttcttgccctgctcctggtttgagaggctcactttcataaatcctgctaatactgtttagtaaaaatccacatatcccttatgtctactaatatcgtgattccctttctttgatatttaagtccttagccaacctgtaaccagccttctgctataaaaagttcctcttcctcctttggtattttatcaaatgtttttcaataatttttatccactgatttattctgcttattgactataaattcttcgttgtctgtgttcagagttatgatcaatttctgaactgaaccctattacgatggccataaaatctactacaatagtattaatgtctttcttcccaatttttaacaaacatcagaaatttttatttcacagtttcccaacagtatgtttgagtataaaaacagttttcagtttgcccccaaaaatgatgtgatccactgtgtagatgtgtatgcctgatccttgtgtccaaaaaagtatgtttttatttaaatggggtgagggtgacagattatagagccaatgttttcctaaaatgctgagtcataagtgaaaccatacaaatcaagaatatagaatgcttggactccaacgtttttaaccctgaggatattttgatgtccataatttatattactgtgaaaataatgcacaagaaagaaaactgatagctctccctctccctctccctctccctcaccctctccatctccccacggtctctctctccctctctttccacggtctccctctgatgccgagccgaagctggatggtactgctgccatctcggctcactgcaacctccctgcctgattctcctgcctcagcctgccgagtgcctgcgattgcaggcgcgcgccgccacgcctgactggttttcgtatttttttggtggagacggggtttcgctgtgttggccgggctgagctcctaaccgcgagtgatccgccagcctcggcctcccgagatgccgggattgcagacggagactcgttcactcagtgctcaatggtgcccaggctggagtgcagtggcgtgatcttggctcgctacaacctccacctcccagcagcctgccttggcctcccaaagtgccgagattgcagcctctgcccggccgccaccccgtctgggaagtgaggagcgtctccacctggccgcccatcgtctgggatgtgaggagcccctctgcctggctgcccagtctggaaagtgaggagcgtctctgcccggccgccatcccatctaggaagtgacgagcgcctcttcccggccgccatcacatctgggaagtgaggagcgtctctgcccggccgcccatcatctgagatgtggggagcacctctgccctgccgccccgtccgggatgtgaggaatgtctctgcccggccgccccgtctgagaagtgaggagaccctctgcctggcaaccaccccgtctgagaagtgaggagcccctccgcccggcagtcaccccgtctcggaagtgaggagcgtctccgcccggcagccacctcgttcgggagtgaggtgggggggtcagccccccgcctggccagccaccccatccggaagggaggtggggggtcagccgcccgcccggccagccgcctcctccgggagggaggtgggtgggttagccccccacccggccagccgccccatccgggaagtgaggggtgcctctgcctggcagcccctgatgggaagtgaggagcctctctgcccggccagccgccccgtctgggagggaggtggggggtcagccccccgcccggccagccaccccttctgggggggagagaggtgggcgggtcagccccccgcccggccagccgccccgtccgggaggtgaggggtgcctctgcccggccacccctactgggaactgaggagcccctctgcccggccagccaccccatccgggagggaagtgggggggtcagccccccgcccagtcagccgccccgtccgggagggaggtggggggtcagccccccgcccggccagccgccccatccgggagggaggtgagggggtcagcccctcgcccggccagccgccctgtccaggagggaggtgggggggtcagcccccagcctggccagccgccccgtccgggaggtgaagggcgcctctgcccagccacccctactgggaagtgaggagcccctctgccctgccaccaccccgtctgggaggtgtacccaacagctcattgagaatgggccatgatgacaatggcggttttgtggaatagaaaggggggaaaggtggggaaaagattgagaaatcggatggttgccgtgtctgtgtagaaagaggtagacatgggagacttttcattttgttctgtactaagaaaaattcttctgccttgggatcctgttgatctgtgaccttacccccaaccctgtgctctctgaaacatgggctgtatccactcagggttgaatggattaagggcggtgcaagatgtgctttgttaaacagatgcttgaaggcagcatgctccttaagagtcatcaccactccctaatctcaagtacccagggacacaaacactgcggaaggccacagggtcctctgcctaggaaaaccagagacctttgttcacttgtttatctgctgaccttccctccactattgtcctgtgaccctgccaaatccccctctgcgagaaacacccaagaatgatcaattaaaaaaaaaaaagaaaactgataatgcttaaaattaaacatggtgcaacgtatcactgactaaaaactgatataagaaaacattattccaaaaaacatttgggtatccaccacttaacccaggaaagtagaccgtgtagaaataatggtccctacagacaatttgtagaagcagaatctataaattatgatgtgaaaaattcaggtaatttttgtttaaatatagtgatcctgataaaaattcaattgaattaaaaattagagaagattaacttgaattagttatgtttttataaaatataaattatgaagttaaaacgtaatatataagtatgctctggaaaacacattctcaaatgaataaaatttctttttattggattagttgaatgtttgatgttatctgtttattaaacccaaggggatatcaccaccgatcccacagaaatacaaactaccatcagagaatactataaacacctctatgcaaataaactagaaaatctagaagaaatggataaattcctcgacacatacacccacccaagactaaaccaggaagaatttgaatctctgaatagaccaataacaggctctgaaattgaggcaataattaataattagctttccaaccagaaaaagtccaggaccagatggattcacagccaaaatctaccagaggtacaaggaggagctggtaccattccttctgaaactattccaatcaatggaaaaagagggaacctccctaactcattttatgaggacagcatcatcctgataccaaagcctggcagagacacaacaaaaaaagagaattttagaccaatatctccgatgaagatctatgcaaaaatcctcaataaaatactggcaaaccgaatccagcagcatatcaaaaagcttatccaccatgatcaagtgggcttcatctctgggatgcaaggctggttcaacatacacaaatcaacaaacgtaatccaccttataaacagaaccaatgacaaaaaaaccatgtgattatcttgagatatcaagagatgcagaaaaggcctttgacaaaattcaacaactcttcctgcaaaaaactctcaataaattaggaattgatgagacgtatctcaaagtaataggagctatctctgacaaagccatagccaatatcatactaaatgggcaaaagctggaagcattccctttgaaaacaggcacaagacagggatgccctctctcaccactcctattcaacataatgctggaaattctggccagggcaatcaggaaggagaaggaaataaagggtattcaattaggaaaagaggaagtcaaattgtccctgtttgcagatgacatgattgtatatctagaaaaccccatcatctcagcccaaaatctccttaagctgataggcaacttcagcaaagtctcaggatacaaaatcagtgtgcaaaaatcattagcattcttatacaccaataacagacaaacagagagccaaatcgtgagtgaactcccattcacaattgcttcaaagagaataaaatacctaggaacccaacttacaaggacgtgaaggacctcttcaaggagaactacaaaccactgctcaatgaaataaaagaggatacaaacaaatggaagaacattccatgctcatgggtaggaataatcaatatcgtgaaaatggccatactgcccaaggtaatttatagattcaatgccatccccatcaagctaccaaagactttcttcacagaattggaaaaaactactttaaagttcataaggaactaaaaaagagccctcattgccaagtcaatcctaaaccaaaagaacaaagctggagccatcacgctacctgacatcaaactatactacaaggctacagtgaccaaaacagcattgtacttgtaccaaaacagagatatagaccaatggaacagaacagagccctgagaaataatgccacatatctacaaccatctgatctttgacaaacctgacaaacacaagaaatggggaaatgattccctagttaataaatggtgctgggaaaactggctagccgtatgtagaaagctgaaactggatcccttccttgcaccttatacaaaaattaattcaagatggattcaagacttaaatgttagacctaaaaccgtaaaaaccctagaagaaaacctaggcaataccattcaggacataggcatggggaaggacttcatgtctagaacaccaaaagcaatggcaacaaaagccaaaattgacaaatgggatctaattaaactaaggagcttctgcacagcaaaagaaactaccatcagactgaacaggcaacctacagaatgggagaaagtttgtgccatctactcatctgacgaagggctaatatccagaatctacaacgaactcaaacaaatttacaagaaaaaaacaaccccatcaaaaagtgggtgaaggatatgaagacccttctcaaaagaagacatttatgcagcaaaaagacacatggaaaaatgctcatcatcactggccatcagagaaatgcaaatcaaaaccacaatgagataccatctcacaccacttagaatggcgatcattaaaaaatcaggaaacaacaggtgctggagaggatgtggagaaatagaaacacttttacacggttggtgggactgtaaactagttcaaccattgtggaagtcagtgtggcgattcctcagggctctagaactagaaatactatttgacccagccatcccattactgggtatacacccaagggagtataaatcatgctgctataaaggcacaagcacaagtatgtttattgcggcactgttcacaatagcgaagacttggaaccaacccaaatgtccaacaatgatagactggattaagaaaatgtggcacatatacaccatggaacaaaatgcagccataaaaaatgaagagttcatgtcctttatagggacatggatgaagctggaaccatcattctgagcaaactatccaagcacaaaacaccaaacaccgcatgttctcgctcataggtgggaattgaccaaagagaacatatgggcagaagaaggggaacatcacaatccggggcctgttgtggggtagggtgaggggggacggatagcatttggagatatacctaatgttaaatggcgagttactgggtgcagcacaccaacatggcacatgtatacatatgtaacaaacctgcatgttgtgcgcatgtaccgtaaaagttaaagtataataaaaaaataaaataaaataaaatttaattagaaatgaaaaaagaaaattctacaacttgaaactagatagaagatagatcagaaacaaaaataggagtaaagtgtgactttcttctcactgtttgattattatagaggcatttttatttcattaaaatcttatatttctggggctagttaatgttatgatattttatttttaaatagttttattttatttacttcagttaatttgtaatttttgaggatgcattgtaggtgtatatacttatggggttcatgagatgttttgatgcggtctcgcaatgcataataatcacatcatagagaatgggatacccacccactcaagcatttattctttgggttaaaatctgattattccttcttagctagtttaaaatgtacaattacattattattgaccagagtcatctcgttgtgctatcaaataatatgtcttatttattctatttttttgtacacattaacagtccccacctttcccccagcctccactgtctttcttagcttctgaaaaccatccttctgctctctatgtccgtgaattcagttgtattaattcttccatcccacgaataagtgagaacgcacagtgtttatctttctgtgcctggcttatttcacttaacatactcttctcttttatccacgttgtcgtaaaagacaaaatctcatttttatggctgaatactactccaatgtatatatgtactactttttttatacattcattcatttgtagacagtttgctttcaaatcttagctattgtaaacagtgcagcaacaagccgattttctttcttttgtgtcaatgcccatcactgggattgttgggttgcattgtagctgtggcagctcaatttttagctttttgaggaacctccacacttttttatagtggttatactaatttacattcccaccaagagtgcactaaagttttctccacatcctcgtcagcacttgttattgtctgtctttgggatataagacattttaactggagtgagataatgtcttattgtagttctgatttgcatttctctgaggtttaatgatgtttagcaacatttatatgtctgtttgccatttgtatgttttctttgtagaaatgcctcctcctggctgggtgtttcatgcctataatctcagcactttgggatgccgagatggaaggatcacctgaggtcaggagtttgagatcagcctggccaacatggctaaacccagtctccactaaaaatataaaaatttgtcaggcatgtgttctgcatgggagatccatgaggaagaagaaaaggcacacacaatacttttaagggtaaacatcttttgtctcaattatatggcaatacagatataataagtaaatgatatgataagcaaattgatatgagaagggaaaaaatatatatattttttatatatataaatatatatattatatatatataattatatatgtatttatttacatttatttatttaaataattatgtacataattatataattatttttatttacagttatatgtataaattatatacatatatatgtatatatatatatatatacatatgtttacacacagcagactacagagtatggaggaagcatcaccagacagagaagcaatagcctgggctccagagtcagacactacactcaccagactatggaggattcatcaacagaccgggaagcaacagcctgggctacagagttggcccctcatccctgcagagatggggagaggtctcaggaagctctagtgccatctgggaccctagctctttttgtaaggagttctttggcataaggccgggtaacgaggactcttcactactgggctcaaaaaccacaaaaatgtcaaatttttggcgattgtctgttgtttttcaataactaacatacaggaacagattaaaatagaaatttctctgagacactggtggatgaacgcctgaagaaactcacagaacctgttccgggacttggtgaccattgtttgtgtccatgttcaattgagataaaattgagtatttaacttttcttccaaatttggcttcaatttgatactcaattgtaggaaaatacccttacagatacttggggaaagcatactttatacagattacagattcagtgtaagcacaggagaattaaaagcacagttaatgaaaaccacacccaccatggctgtgcaaggagagtcgtagtgtgagaattgtcagggatatacacacaacattcggtatgcagtaaggtacagggacgattctccaacgtagcccatttttggtggcctctggcaattccacgcatagccaacattgactgcagttggcttctgttgcagtggtggctatgcagatgatgaatttattcttggcatcagacacagagacacaggtactgaccattagtaaacaggttattctctgtaataaccaaaacagaggggaacataatattgtttttcatctttaggaaactgtactatgccttcagtttcttctcccatagctacaagttcaccagccataggagtaggatgtgatggacgctgtactcatattttggctccaggatttaagctacgtgtaccagtgcgtctgaatctcccagttctgtatgtagcctctgttggggcagagacatcctcaggggttaattgttgacaaggtaccactaaaaattgaggaacccacatctgcagttttacagcaaaagattctcgagtgatattgtatacaatgatctttaactctcccctgtaaccactctgaattataccaccatacattatgccgttcattgcaagacttgaatgtgttttaatccattcatccgcattcaaatttgcaactatggtggaaattttggcctgttgatctgtctgctgattaaatagtctgtcgagaaagcagagacacatgagcatcaacatgaaaaacagtgataatgatagtgtgcaccaggattcaggtatcttcccaggagtgttttccctctttatgcctaattaaccatttgtaaagataaaatagagaatgaaggtggtgtcggtgagattggacatcaaaagacacaaaaggaatgtgacatggtgacctgagaaaggaatagagagagaaattaaaatagacaaaaaggggaatcagcaaggagatggaggaggcagaatagaagaggggactcaacaaacaggagcagttggtgcaacagagggtgcatcgcatacttgtacaacgcttctttcattttctagttacttttccttttaaatttgtgtcagatttagttaaggtgtcaacgtttttttaaatctttttatatactgaaaatattctttgctgtttagtaaataactttcagtatttcaatttgctcttgataagagtattaatttttaaatcaacagacaacattcagtaaaactagttagtctaatatgcagcagcttcttctcttccacatgtgatttgggaatttaatgcactgtgagacgaaatttccaagtctatgatgtctttaagttccctttgctctttttttttttagcagatattgaagaatgggctggctgggcatgaaactttcttccaccaagaccatcttttcatgataaatacattgtcctgagttatttttatagctaatcctctttcttgtttccaattgtcaattattacatattttcaactttataattttggaagttcgatgtgatttctcaaaaaaaagaaagaaaaaaagaaaatgcttgagtttaatgtgattagaataacagagaagtttctcctggtcaagagtataaaatttggtctgagacctttagccagtgctggtgactctctgctggcctgtcctcatcctatccctcccttcccaaacatacacttacacagtcacaaggcagctgaggagaggagagcacagactttaaactctgtatgtgtatatattttaagatagaaccttgctctgttgcccaggatggagtgtagtggcactatctcggctcactgtaggctccacctctgagttcaggcgattctcgtgcctcagtctcccaagtagctgggattacaggtgcctaccactatgcccagcaaatttgtgtgtttttagtagagtcagggttttgacatgttccccaggttggtatcatactcttagcctcaagcgagccactggccttggcctcccaaagtgctggaattacaggcatgagccacaatacccggcctgtctttatatgatttctttggctgtaaagagtatcagtggtgtctgtacctttctcagtggcttagggtatcgtttttagcagaggctgtggtaaagttttgctgggaataggggcaccagaggtttagtcattggatcccagtggtggcagtggtgagcttaccatgcctgcttttgggtctcaaggcagttatgctggcagcagtgttaacaggtccaggaagactaattatttggccttcatgtgatttgctcaggtgtcagcagtgagcaaggtgggtgggcagcttcttgagcccctggacagtggttatggcatggatgatggcagtagcaacgacaagaaaaacctctgactcccaagcgttccatgctggtgttggtgtttgctgtgatgggctgggaaggccagtttctaggaacacaggtggtgtatatatgtgggtatcagctgcgttagtagctccaggttcagtgagtccatcctcaggtctcagagaagagtgctcaggtgccaatcttgttagacttcactggactgaagtccatattttaagcactatctggctccacacactcattggccgttcttatcatcactctgagcccattaaccccgcagcagaaaaacatcaggaaagtttttaatatttcttctttggggcacagtatgcaaggaaaggaattgtattaagagatgaagtaagtactcttattagaaaaaggaacactttggggccagaaatggaccagtgtccaaggcatgcagaaagcaggaaataattaccgggtcatgggatggaactatggagagtgactaaagtttcaagatcataaaccagtctttagttgctcctaatttaatttaatgcaatcctcactctttgtcatcatttggttttaatgtataaagctatggggtctgcttattgtatgttttgtagtataatttggaaattaatctatcagctcttttttctcagcccagttggtgtcttgtcaactcctctgcacgaattgcttcttgttttctcacagtccagccctatgttctcatgagctgtgaccctggggtatccaggctctggtttgcctgctgtggaaaaagtgcagctttctaagctggtcacatatctctacattaaatgtacattgtctttttaaagcaatgttcagacattcatatattctttcttcctgaggtttaagcaccacaagcagcagtcatataatggagagattctcaacaacagagtgagtctctgccataattggatttattatacattagaaacagcagttacatactaaatgttttacaaagtgttttttataatttttatttccttaaatattgcaaatagaaaatttagaggtccaacatttatttaaaatttggctcttgtaatttgcagtggaaagcttatatgagtatctacctctaaaccaattaattaaaaatgctctggggttaactgggcaccaaagtataagaaaattttaattaagtgaaaaagtctaagtaatgaccaactaaggaaataaaaaggaaattatactttcaaccccctttcccccagttgctctatgctctattttttttctattgccaagttgtacaattttatttttgtccttgataattgtactttattttaacgtgactagattatattttattttattttattttattttattttattttattttgttttattttattttaatgtgactagattttgcctcactccaggctggagtacggtagcatgattatagttcactgtaacctcaacttcctgagttcaagtaatcctcctgcctcagccttctaagtagttgagaccacagttacatgctataatgtcaaaataatttttaaaacattttcagtgacaaggtcttgcttaggcttgtctcaaacttctggccttaattgatcctctggcctcagcatccctagcagctgaaatttcaagtgtgagccactgagcccagctctttatttttataaatatttatctctttagttttttctgaagcattttcaacaccttcacctgaactttcaggctttcaactcacagttgattttatccattttgctattcatcctatttattctattgcttatatacttttgtaacatatttaatattttgagttttaaattcttgatacttatatgtatgtatttttagttgtctcttttgcaaggctgcgattctctctagagaagagaatgggctctatgctttcttgagaaaagcattttataacatgggagtaaaacagaccctgtggaaaataaaataaaaggcattttaatcatgattttttataaattgctatttgggagacacaaatttagcaagaagctatatcatgttccattcagatgaggttagggagggacttataaagttttactgcaagtttacacaagtgaaagattttagcacagtctatgatggacaatgtttgattgccagcttagactgtatctaggcaatcatcagcttaattcagcacagctttctctccaggaggtttgtgatcaggctcagtataaacaatccaagtcaaatgcagttgcctttttaggacatctgtaattttcccagttcgaacaggtaaaattccacctgggtgtgtatgagtattaattcaactcctcatgtcctcctagttgtctttagagacctctcaaataactatctccattttggatttcttttaattagaaataaagagcgcaaggattatcactggttgggaatatagaaaaatagtgcccacctgtgattcatcggaccccagtcagagagaaaaggccaagatatgcctgacagaaaggcttgaggacctttaggtaatttattcctcaaaaagaattggttcacacctgtaattccagcactttggaaggccaaggcgggcagattattggaggtcaggagttcaagaccagcctgacaaacatagtgaaactaaaaatacaaaatttgctaaacatactaaacgtacaaaaattagctggacatgaagctgggtgcctgtaatctcagctacacagaagcctgaggcagcagaatctcttgaacccaggaggtggagatcgcagtgagccaagattttaccaatgtactccagcctgggtgacacagcaagactctgtctcagaaagaaaaaattggataaagaattgccctaatgctgggaattttacctcataggtagtaaaaatatttacagaataaggcccaggtgtagccataaagtggcattacaattctttcattctagataagaaactaacttaaaaaaagaatagaaattctaaggtaagagacaaaactctgggaggatttacatctaaggtaaaggctcaatcacaggacaccagaagaagattgagaatgcagcttcctttctgccctgcatccattgtcaatagactttccctggccttctccttttgactttggtcattttattttataatgtttttttccacatagacctgatgcaactccagagttggaagaaaaaacaacaatgtcctaatagttgcttagaggaaacctcagcaagtgaagcagaagttgatttattttttgtaaaatcatagaaaggtattcatcctcctgatctctgcaactgctttttaaagaaatctatatttccaagactgtcgctatgctttgtgaaaataccttcaaattattaattctgcaagttcgaatgatctatcttcactctttccttgggttaatattaaaatgaacatatgctctgagaaaaatggacctgggtgtcttatccggcagccagaaactatgactgcttttctcttcttcctcatacattatgctgccgactctttaggatttcataattcaaggagaaatgttagagtctgtatctcatttaagcttacacaagtgaaataaaaagaaccacaaccacaactccgattttgtagtagaatgagattttcatataatattcgactctagcatttactatttacgaaaaataaatatttcccctcctctctggataaacacattctggggaagagctctcagggagatggagaagagctgtctcttcttcttctgattttcagttgttccagcaaatgtctcacaatattctttacattgaagctgcaggaaatgaaccaaaacaccaagtgccttagttgggccctgctgctgaggaagaggctgtgtttgagctggtctcagtttgccctgtcactgacataggactctgtactggggcccggctactagatggaagggctaaattatgttgggacttccctcagaattatggctcaccctcctccctcatctgcattctgagctccaggcactgtgtagagcactccgttcattgacagttcccatgtatccctgatatgtgagtcatcagcacggctgcacttcacagaggacaaaatgaaatcgaggggaggagaggcaactctcgccacctgcaggactggtcagtggtggagccgggatcccagagtcagcttttaggatcacttcactcacattaagcccaaaacttcactgagccttttaaaataaagggatactgattgtcccacctcacagccctcgggtaaagctagatcaggctcaatgtggagggcactgagcacagcacaagttgcatgtgagtggggactgtcattgtttcctggggccctcaggtttggaggtttcctgccatgtagtgacagctggcttagggggcattaggggaggggcttccccacagtttgttgcaacagccacctggctcaaccaggaatgttccaaagtcatccagataatttcccagatgaccactcagtcatgtggtgtcctactacccatgggatacagcctaaactttttatcataggaggaataatttctagtgtctgacagcacagtaggataactacagttagcactaatttttagtatattttaaaatagatagaagagatggctttaaattctcccaacacaaaggaaatttttcaaacacaaagaaaataatatccatgtttgaggtgatggatattctaattaccctgatttgatcactgtacattgcatgcatgtatcaaaatatcactcatgcaccacaaatatatactattattatgtatcaacaaagggaaaattgctaaaagtggctcccaactaaaaaaaaaaagtcaatttctaagtcacagaaaaagatgctcactttaaattgtaagttctgtgacagaatgtaaaggtttgcatagtcacttttacagtcccagactatcatgcatagaactgcctggccccgtgtgtatgtacacacagagatacaaccatgcttctctagtggggcatttttttctccctgaaacatttgccaatgtttggaaacctgtcttgctgtctggttattttagtaaattgattgtgactgtaattaggcccaatttaatgactgtaattaggcccacttgctgtctgcacatagatgatcaggggcaagtagtcgaagatatagttaaagacatgatgaaactggcacatgtgccagtacaggtgtggcaccgatttgacactgaggccatgtttgaaaatggttcccggcactagaaggatttaaaactcttataatggaaactatagtagtaataggaacctgcttactgatctcttgcttactagctgtactcattcaagtggtaaaagttttcatggcaactctagttcaccagaacgcttcagcacgagtgtactacatgaatcactatcaatctgtgatagaggaagacataggtagtgaggaagaaggtgagaactcccactaataaaatgagtgagagtctcaaagggggaaaataagggaggagaccaaccctcatattgtcttatacccaatttctgcctccaaagaaagaagaagtaaaaactagaaggcagaaatgaaatccacaagcagacagcccagcgccacaccctgggcctggtagttaaaggtcaacccctgacctaatcggttatttgcataaaaaatgcactgtgaagatccctgtcctgttcagtacctttctaattaccagtgtatgcatcccccagtcacatacccactgcttgctcaatagatcgtgaccctctcatgcggacccccttagagttgtgagcccttaaaagggacaggaattgctcactcggacggttcagctcttgggaaagaagtcttgctgaagctcccaggtgaataaacaccttctttctttaactcagtgtccaaggggttttgtctgcagctcttcctgttacattgggagaggccaatgtgggcagcgacatggggaggcacagatcccttagtggtggctgtgtgctctgaggcgaatgtggggaaaatcagacctaagatgcttcatatggctgatagtaccagctttacagctgcagcagtctgcgacaggggaaggcatggtcctggctaagcagcatctgaaactcccgcaataggaccaggtctggtggactcaagagtgaaagtcagagtgaaagtgaactgcaagagaggaaatgagagtgaaaacatcaaaagtggctcctttgaaaagcataataaagaattttaaaaaaagagttagaagtgattataggatgaaactgagtgttcaaaagttaaggacatactgtgaattagaatagccctgttttagtgtcagatggcttgccaaaggcactatagaaaaattggccgtgtgttttaaggtggtgactagggtcagagaacagccaggacattcagacctagtctttatattgactcatggctaaatgaatgcagccctgcctagcagtttactgtagaatgctcgcagctcacggcaagagaaaatcagctgctctggcagctacagagttaaaaggagacacagaggcttgtagcacctcccagccaaaagtgaaagtaaaatcagctgccccagcagctgaagacaaatgaaaaaatctcagaaaaggcagaaaaaccggttttgtaacaaccacagaaaagaatagagaccgctcctccttacattccaatctaccccctttaccaaggtaactgtccctaaggagttaagttcaaatggatacatgctgccagtctcacccgagaaggtgaaatgagagcgaaaatcaggcaggccgtctcaggtctggtcgtgcataagatatgctcatgcctcttaagaggacaggaggacccccactaggacccagatgatgcagtccagattcagcacctacaaaggtgccgagaagcccatctgcaaaggctaaaggatggtaaaagaaaaaggcaatcaatatttttaaaaatctcagacatgcttcagggtgcagataaaagcacagcaagttctatgaaagactttgtgaggcatttttattgtacactccgtttaaccctgaggctactcaaaaatcagtgcagggtgaatccagcacttgtaaggcagacccaaggagatatcaggcataaattgcagaagttacaagctccgtaggcgagaatgctactcagcttattaaagtgacaaccaaggtgttaattaaccgagatgaggaggcaaaggaaaaggctgatcacaggcttaagaaaggctaacttactagcagcagcccttccgggaagaggagctggctttacaaggaggcatggacgcgggcgtgaacgtagtcatgaaaaaggctagtctggacaggagtgtgaaggccagccgaggctagagagagattaatgtgcatggtgcaaaaggaaagacactggaagcataaatgtcaaagaaataatgaaaatgatcagggcaatagtaaaagaaacaaaaaacaaaccaaaaaaacccaaaaaaacagaaccaaaaaatcacacacacacaccagccaagggctactacacgcagaagaaacccaagaaccactgcacctgctgtagaaggcagaataaaaagtgtcagaaaaaagctcaaatctcctctaaaagtgtcaatatttaagcttttatataagccaagaggaaagatggcttagtcctgaaaaaaagcaggctgtttgtgcactttctactccaaccacccggtgtcaagtaagagagtttctaagagcagcaaggttctgccgcgtttacaacccaaatttcttgctcatggtcaagccatcataccaagccactaagaggaggaaaaaaggagcccctcctctaggaggccaaagaggagaaggattttaaagaaatcaaagaagccttgactcaggccccagctttaggactgccagatctaactaatcaagcttttcttcttgtatgtccacaagtgaaagggaggccataggggttctgactcaagccataaggtcatggcatcgcctggtggcatatttatccaggcaattagattctgttgcacttggatggcctccttgtcttaaagcactagcagccactgccgtactggtgcaggaagctagtaaactaactttagagactgtgaataccctaaatccggctaccttactctcatcgagtcagtgccaggaggaccgtttcattgtggtgtggacgtggtagatgaagtgttctcaagccagagagatttgacagatcagtccctcagggacccaaacattgaatattctactgatggaagcagtttcatactaaaaggagcccgccaagctgtgtatgcagtggtgactttagactcaacagtagaggtgcagtcttcatctacagaaacttctgattagaaagcagaactaagagctctgacaagagttctctggctagcaaaagaccaaaagaccaatatttatacaggttccaaatatgcttctgccactttgcatgttcataaggttatttacaaagaaaaaaagaagacttttaactgcggaaacaaagaaataaagtacaaggaagaaatcctacagctcttaaacgctgtatgggccccaaaagtgacggtagtgaagtcctgcaagaggcagcaaaaagcaagaacactaagggctaaaaaagatacgaaggcaaagaggcaaagaaggctgcaatgacaactccacctaaagaagatgccttagctatgcctctcctcccggagattcccctcctggagatcccaatcttcactccaaataacagagcttggcttccccaggaaaataagaactacattgaaagaggataatacaaattcttcaatgggaggctagccatacctgaaatggtgacccccagatttgtaaaacaattccaccaccgaactcagattaaaaaaaaaataaagacattattaaggcatcatttttatctgccatggctcattgctattactcgggccatttgtaaactgtgtttaacttacactcggaacaatccacgacaagatcctactcggcccatgggagttcaggaaaaaggagccatgccctgtgaaaaactgctaatggacttcactgaatgaccctgagacgggggctatcagtacatattggtgttcatttgcaccttttcaggatagctcaaggcctttcccaccaggacagagagggcactagacgtgaccaaggcgttaagagacattgttcccagatttgggctgcctctaactctaagatcagagaatggaccaacatttgtggctaaaatagttcaggacttaactcgactattaaaaataaaatggaaataacatacagcctacaggtagcagatctcaggtaaagtggagagcataaactggacactcaagcagctgttgaagaaattttgtcgaaaaactcatctgaagtaatatcaggtcttgcccatggtcctcttatgagtcaggtgcacccccaccaaaaaactgagtattcgccctctgagattttgttcagctgcccaccccccagaaaaatcagattcagggtaatctctgtaaattgggaaaactaactttaagaaggcaaatgcaggctttaagtatggctatactaaaatgcatggttaagtatgtaaaaaaatgcctataagtctaacagacccagtacaccctttcaaacctagggacttcgtttaggtaaaaaatggaattcaaccactctaggacccatatacgataggcgccatattgtaatcatgtctactcccactgctgttaaagttgcaggtgccacaccttggattcaccatagccatctaaaaccagtgacagtagcgagtcgtgatgacaacctgtggattagccaacaagacccagattgccccactcgaatagccctatggcaaatctcagccaccggtaaaaaggacaaccgccctgctctgaccacactggaggctggtcagtctaagcatggctgaagcttaaggattcttcaaactctgctctagtcacatcccggaagctgactagtgtacacacagccgaagctaagaggaccatgtccagataagtaaatgtgaatacaatttataaccatagttacaattctgtcaatactgattgttccgttgttatgttattactgcaaatgctgcaaatgtctatgcccagaggaaagtttttgtgcccatgtgtagtgtaagcatgtttctattacatacaacaatgttgttaccatttatgcttatactgaaaggggataaatctcttgaaggatgtccatgctgtgtacacattacctggataaaaaataccacagttaaaactctactgtaccatacctactatgaatgtacaggaagcaaattaggaatatgcatatacaaccagaccacctattcagtctgtgactgaggaaataatcagctatatgtatgttatgagcctgggctcttaccctattaattctattttgaggtaaatattatatcagagggagaaacagaaggaaagcttatagctcaaaccaaagaaatcccacccttctaaaaagggcctatttcttctttgatgactgccatgccacgtatgttcataatcctaaaaaccagattgtaagacaaggacatgcgatcctttaaattttactatcttaaagccagagctacctttttggtctacaggacagacagcactattaccagttgatagacaaggagcaggtcttggagttccactactaattgtcaaaaatactataaggactcaaatgcatccaacccctcaataccaagtcattctgtaagcattttgatcagccagtgcccgaggttcccccatcaaccaaaaacttatttgctcaactagctgaaaacacagatggcagcttaaaaatttcttcatgctatgtatgtagagaaactaatatggagaatgagtggcaatgggaggcaaaggaattaatgccacaagataacttcactttgcttaaccctgccagtgaaccaacagcctcagccagtgtttgattgttaaaaatctccataactggaaagtactgtatcactcgatggggaaaggctttcacagacgcagtaggaaaaacaaccttcctagggcaacagtattattacgagactaaaaacaaaactctatgaagaaatgcccagaatgactcctacttaccagatccaaacactttctctggattccttactctaagctgcacttggcatcaggtagatgattcaaatgcttgaaaggcaccctctggcctatattggatctgtggagcatgggcatattggcaactgccagcaaaatgggcagggacatgtctgttaaaagcaatcaagccatccttctttctaattcctctaaagcaagggaaattcttagaatatccagtttataataaaaataaaagaagaactagaaaaagcataatcacaaaagtaacaaaaatatcaaaaaagatgtggacacaggagactaaaaagataataaatgacctcctgaaagaatcatgacatgctatgggccagctacctaggtgcaagacaggtcatgagggtactgcaccataatctatatcctcagccgcatcatgaagttgcaggcagtccttcaaatcataaccaatgaaatatcgagggcactagatttattggcaatacaagcaacacaaaaaggaaatgctatatatcaaaataggctggctttaaattatctcttatcctccgaaggaggaatatgtagaaaatttaatttaaccaactgttgcctagaaatcaatagccaagaaatcaatattagtggtcataaaaattacagctagaatgcacaagttggcccaggttccacttcagacttgatccaggtagtccccggattccttgtttggaggatggttctcagcatttgaaaaattctaaaccctcattagtaggttcttgcttattctttgcatctgccttatcctcccttgccttttgtctctgtttattaggagtattcagtcaactatggaggcaatggtagcccaaaacactactgtacagtctgtacagttgatgcattaaccagatatcagccaccgccagaagaagaaaaagctcagctccatgaagacttggcaaataatggtgctttctattaacacctctgttataaaaagcaccaatggggagaatggaacaggaattataagagattaaagagtgtgtaagcagaaactcacttgtgtgtaagaaaacccaacttctgttgagaaagagtaagagctggagtcctttaaaaactaactgcctgtttttctgtggctagtgatccttatctctcctcctttcccagggattgtgaagaccctgtttcccaagctgtgaagctgcaaggtcactagacagataaattcaagtcacaaaacaggtttttccttgaaaagtaagaaataatgtaatgcatgtctcaattgaataactgtctttgtttcttgcttctgtagtatgattctccctgcacaaatctctccccacccatgaaatgcttaaaaggtaacttaactctttgttcaggactcattctttggatgttaatccactggaccagtgcacctaaataattaataaataccctcctgaaccccatcggcctctctgatttcttaaaattccactacatacagacttctctactattgacccccacattcttttcttccacacaggaagtccacatataaaatcgtgtgtgaaactattctatttgaggtgtatttctgtgccctaggatccagataatcccttacattttaaattcttgcttttttgtggctcacagtatgatgttatcaaaaattaggcaaatattctgatactttcttaattttacaagggggagaattgtccttagataattacattctggaaaggccataatgagcaactctggacctgattgattgtcatttttgggtccactgcagggctgcatactaagggacagtggtcattctgagttcatagaaaaaacctgacatgagaggggacattttgctagacatgccacctggtgcacagagctgaaaaatgagacctgctggtgacgtgcttatcaagcttagggtcttgagggctttttaaattcagtgctttaaaagctggcctcacatcctgagttcagaaaaaccaaaattttttgttttctatagactttttggttgaaaatcccttttccatggacttttaaactagttatttacagcacaagccccatgtctagtaacaaaggtgtcagccatcttcaaaatgtgtttttattaatactttatttttaagctttattaactaaagatatatttatttatagtcactttgagtctccaggataaatattagtcttaaattgttatttctcataaagtcttggaggttgctaagttctactgttttgcacgtaaagaatcaagaaactctttagtacaatattagaaaatacttgtatttacttagattttatagtactatttttatttttctttttatttcttagatataggtactcaaatttctacaaactgacaacataatatgcttacttgaaaatattaccagaataattgaagttgataattaaaaatgaaagataaaaaatgtgagaattgctgaagccttgtggtgggtatgtatgataaatgttagtttataattctccctatgtttgctaagattttttattttcataatatcttttaaatatataatttaaacatcttctcacatgttttatcaataaatttaggagttcaatattgaatttgagtgttgaaattggttacaaatgagggacaaaagagcagctttctaattggccatacactaaaagtaccagcaactgtggacaggggtgccactaacacactttatttaacatttttgctgtgagtcatttttgataaggaatattttaaccttatgatgacatcataacaagtttctaataatcagtgactcagagtggtcttcaatagtgtactattatttaatttacatttctggcctggtaaatctaagcaggtaatttatgtctattaatacattttacaattgtaatttttttcttataactatttgccatgaagattttaatgttataactatatctttgtcttttcctctttatttaacatgccttgagatgaacaataaatgggtttggttttacagtctgtgacttagttctccaaaagtcaacagtttcatttggaaacattttagagggatataatcttataacaaaaccatcacatgttttaagtgtacaattccaagttcttaaagtgtatttacagacacccataaccacaatctaattttgaaatcaccttatcactatggaaaaagaaattaatctcttttgtacttactgatttcattaccctggtcataggcaatcattagcctgtttttatatataagccttttattaaaagttattttaagtgaaatcataaattatctgcccttttgcatttggtttattttacttactttagtgattttgaggttttttcctgacatagcaggtattattacttcattttctttgtttggcacatagtattttattgtatggacacaccacacgttattttttctgttattatttgatggatattttggttttatcccctttgggctattacaaatactgctcctttgatcatttacatctgattctttgtgtagtcataggttttcatttcttttgagtacgtaacagagtaaaatgtctcagtcatatggtgatactatttatagcattttgaataattgccaaattgttctttaaatcggttgttttttacactcccacatacaatgtgtgaggctttcatatttttgatatctttggcaaccttttttattgccttttacaggtcttctagtaagtatgtcattgagcttttgatttgcatttctctaaactaataatgtcacatattttaaatttaatgacaaattttgcttcttatctgtagaaatttttaattcaaattccttgcacatttttcaagtagtcaattgtctatttattattgatttataagactttgtgtatttgagcaagatggctgaatagacaaaccaaggtggaacagctgacaccaagggaccaggatgactggcacactcttaaccgagggcaggtactgatagtgatggaggaaagacacaacatctgaacttaagattcagaagctgggaaccctgcacagggctaaagcacagtggaactgatttctggcccccagtgactctgagaaaaacaggtgagtttaagtggcaaggagctacctgctttcctgactggcctctggaatcccactggcagagaccctctgaccatcatggaaaatgagttgaaaggaagagctgcttagagaagtgacaggggcagcacaccagccagtgcacagccaagagggtttattgtgggaacatgtgtagtgaagcatgtccagggatgcccacaccaataagcttaacttgctcccataagagacgttagccctaggggaaattttggacaaaaagtctgcagggtggtggcccatcagatggggctgttttgacctgagcttgcgttggtgtgctggcctctcctgcgaccccaattcggccctgcatgcttgcagtgcagccttgagtaccctgggggcctgcatcatagatcctgaactggcagatcatgtctgactagtagacagctccagtggggtgaccccatccaggcatcagcctgcctgctgcctctcctcactgcagcttccccccaaggcccattgccaccccacacatcactatgctggtgtgtgtgtgtgtgtgtgtgtgtgtgcatggaaggatcttgctttccctgtcctgtcagtgcacatgtgcatatgcattctgccctggcactgctgttggtaggagtgtactccaggccccctctcctgctataccaccactgcagacagaatcttgggggaaacagaggccatctgccccacaacaccagcaccctgctcctttgtcaacactgtcatttgagtacaactaagcacaaaaaacagcatactctcctcagccctgagcagccaccttcgcctgcatgaatacacacaaaaccacttgactgagccaaccttataacacaattaaacccttaaggtcatcaagcagaataaaaggaaaaatccaaaagttgacaacttcaaatattaaagaaatatcaccccagaaagataagaaagaacaagcacaaaacctctgacaactcaaaaaacctgagttcctcttttccttcaaatggtcacagtacctctccagtaaggttataaatcagtccaagatagctaaaattacagaaatcaaattcagaatatgaatagaaataaagatcattaaaatgcagaagtaacttgaaactcaattcaaaaacgttaagaatcataatgaaatgatacaggagctgagagacaaaagagccagtattaagagcataactaacctgagagagctaaaaaaatcacactaaatttttttataagaaattcacaactattaatagtagaatagacaaagctaaggaagaatctcagagtttgaagactgtttatgtgaagtaagacatacagacagaaataaaaaagagtaataaaaacccccaagcctctgaaaaatataagattatgtaaagagaccaaaggtatgacccactggtgttcatgaaacaggtggggagaatggaagccatttgaaaaacatattttaggatatcattcatgagaacttccccaacctggggaatgctggctagagaggccagcattcaaatttaggaaatgcagaaaactccagtaagatacttcataatataataatcaccaaaacacatagttatcagattgttcaagcatgaaataaaagaaaaaatgtcaaatgcagctagagaggaaagggaggtcaaccacaaaggaaagattatcagtgtaaaagtacgccttttagcagaaatcctacaagccagaagagaccaataccaatatttaacctccttgaagaaaataaattccaatcaacaatctcgtatttggccaaactaagcttcataagtaaaggagaaataaagttctttttaaacaggcaaatgctgaggaaattcattactacaagacatgccttacaagagctcctgaaggaagaactaaatataggtgaaaaaaacctttattagccactaaaaaaacacactgaggtatacagaccagttgcgcacaaacaagtctgcataataagcagctaccattataatggcagcatcaaatgcacacatatcaacactaactatgaatgtaaatgggctgaatgttccaattaaaaggcaaacagtgggaaactggataaagaacaaagaaccaatgatatgctgtcatcaagactcatttcacatgcaatcagtttcataggctgaaaatgacgggataaaaatctaccaagcaaatggaaaacagcagaaagaatgggttgcaaccctaagtttagacaaacagactttaaaacaacaaagatttaaaaaggcaaaaaggcattacaaaatgctaaagggttaaattcaacaagaatatatgtattcatatttaaatatatacattttaaatatatacacacccaacacaggaacacccaaattcataaagcaagttcttagaggtctttaaaaagacttagattcctacacaattatagtgaaaaacttcaacaacccattgacaatattagattattaaggcagaaaattaacaagatattcaagatctgaatgcagcactggatcaaatggatgtaacagacactttcagaactctccaccaaaaacaacaacatatacgttctcattgccacatggcacatactctaaaatcaaccacttaatcgacataaaactgttctcagaaattataaaagaattcaaattatgacaaccactctccgagaccagagtacagtaaaattggaggtaaaagttgagaaaaccaatactcaataccatatgattacataaaaattaaataactcactcctgaatgacttttgtgtgaataatgaaattaaggcatcaatcaaaaagttatttgaaagtaatgagaacaaagacacaacctaccagaatccctgagatgcaactaaatcagtgttgagaaaaaaactgatgttgctgaacacccaccacaaaaagtaacaaagatctcaatttaaccactcaatatcacaactaaaacatctagagaatgaagagctatccaaccccaaagctggaagaagacagaaataaccaaaatcagagataaactgagattaggacacacacaaagaaactaaaagattaatgaatccaggagtaggttttgttttaaatgtggactactagctagactaatatagaggaaaagagagaagatccaaacaaagacaatcagaaacaacaaaggggatattaccactggctcctcagaaatagaaataaacatcggagaatatgatgaacacctttatgcaaaaaaactacaacacctagaacaaatagataaattcctggacatgtacacctttccaagactgaaccaggaagaaattgaatccctgaacagaccaataacatgctccaaaattgaatctgtaataaatagactatcaattttaaaaagcccaggaaaagacgaattcccagccaaattctactggatatgcaaagaagaatttggtatcattcctactgaaactcccaaaaatttgaggaggatcatcttcctcactcatcctatgaggccagcacccttctgatatcaaaacctggaagaaaagcaaaagaaagaaaaatttcatatctttgatgaatattgatgcaaaaattctccataaaatactggcaaaccaaatccagcagcacaccaaaaagcctatccaccacaatcaagtaggctttttccctgggatgcaaggttggttcaacatatgcaaatcaataaatgtgattcataatacaaacagaacgaaagacaaaaacctcatgattattgtaatagatgcagaaagagctttcattaaaattcaaaaccactttatgttaaaactctccatatactaggtattgaggaaacatgctttgaaataataaaagtcatctatgacaaacccacagccaactttatactgaatgggtgaaactggaagcatttttcttggaaactggcacaagacaaagatgccctctcttaccagccctgttcaacatagtattgaaaatcctggccagagcaatcagacaagagaaaaaaataaaggcattcaaataagaggagaggaagtcaaactacccatttgcagattgtattagtcagtgttctgtgtttatggattggaagaatcaatattaaaatgtccatgctacacaaagcaagctacagattcaacgcaatttctgtaaaaataccattgacattcctcacacaaataaatacaacagctctaaaaaatcttaaatttatatataatcacaaaagacctagaatagctaaagctatcctgagcaaaaagaataaaactggaggaatcccattacatagcatacattattacattacacaaaattatactaccgatgtgtagtaaccaaaacagcatagtactggcataaaaacagacacacaggaaaatggagcagaatagagaacccagaaccaaaccatccatctacagtgaactcattttttacataggcaccaagaaaatatattaagaataaaaactcagtctcttcaataaacagtgatggtaaatctggatatccatatgcagaggaataaaactagacctctatcttttgccatgtgcaaaaactaaatcaaaatggattaaatatttaaatgtaaaactgcaaactatgaaacttctgaaagaaaacattggggaaattctaaaaaaccttggattaagcaaagatttcttgagtaacacctcacaagcacaggcaaccaaagcaaaatggaaaattggtatcacaccaagttataaaattttgcatggcacagaaaagaatcaacaaagtcagaaaacaacccacagaatgaaagaaaatattttcaaactacctatctgaaaatggatttgtaaccaaaacatagaaggcgctcaaataactctatagaaaataaaatctaataatcctattttaaaaaataggcaaaatatgtaaacagacattactccaataaagacacgcaaatggcaaataggtatatgaaaagatgatcaacatcatgaatcatcagagaaatgcaaatcaaaattacaatgagctattacctcaccccagttaaagtgggttttagctaaaaggcaataacaaatgctgacaagcatgcggagaaaagggaaccctcatatgctgttggtgggaatgtaagttggtggaaccactatggagaacagcttgaaggttcatcagaaaactaaaaatagagcttctgtacaatccagcaatttcactgttaggtatatatccaaaagagagaaaaatctgtgtattgaagtgatagctgtactcctgtgtttactgcaacactattcacaatagccaagatttggaagtaacataggtgtttatcgacagatgaataaacaaaaaagtggtacatatacacaatgtagtactattcagacataaaaatgaatgagattctgtcatttgtaaaaacatgggttaaactgaaggtcattttattaagtgaaataagccaggtatagaaagacaaacttcacacgttctcacttatttgttaaagctaaaaattaaaaccaaagaattaatggagataaagagtagaatgatggtctccagaggctgagagaagtagtagaaggttgagggcggggaggtgggaatggttaatgggtataaaaatatagttagaaagaatgaatcagttctagcatttgacagcacaaggtgactctagttaagaataatttaagtgtacattttaaaataacagaaattgtataatttggttatttgaaatccaatagtaatacttcatgtgatgaataccccattgactctgatgtaattattacacattgtatgacggtatcaaaatattctatatacttcataaaggtatacacctactatgcacccagaaaaaccaaaaataaaaaaattaggatatactttaagacaacaaatactattactagagatgaagatagattataattagaaggataaattcatgaggaaaataaattaacatatatgaatgtaacaaaagttcacagaagtacataaagcaaaactgatagaaataaaggcagaaatagttgcaacaatagtttcaacaataaaaattgcaagcttcacttccccacttacactattgggtagaagaactagacataagagaaacaaggaaatagaagacatgaataacataaaccaaataaaactagagatatatggagaactcttcaccccaaatcagaatgtatattcttcccaaatgcacatagaacattctctagaatggagaatatgctgcatcataaaaaaaatcaataaaattgaaagattgaaataataaaatgaatgttttctaatcacaaaagagaaaattagagaccaaaaaagcaagaaatttgggaaatgcaaacatgtgtgcattaaatgacacaatcttaaataattaatgaataaaaaatgtacaaatagtgtcagagaatattttaacataaatagacatttagacaaaacataataaaatttatgagacttagtgaaagttgagctctgagggaaacagcagaattactttataaaaaacaaagaaatcttaaattaatagcttaacgcttatggaagcatttaaataaaaatgaactacccagttcacctggagcaaacactatcagtggggtaaaaaggtagtcacgctgacaatcgtaggaggaaatacttggaaacaagacactgagaattaggatagtgatagtactccttggaatctagaaaaaaatggggatgctctaggctagacagattctcaggaaaaacgctaaaacactaagctcccacctgtttgtcttttaatctctgcatgaacagaaagtataggcacaagcagagttaggactttatggcacacatagagattctagatgaaaggatcagaagattcatattttgagagggctaaaatatctacagtcttgctgtcctattaaagtttagtgaaactatattgcagattcgcattgctcacttcttccagtaatccagtgatctagtaaagcttgattttgccatttgaatcctctgataaatgaagtcagcctctaacttgaggtactttttgggatgttggagttatggtcaccatgacgttactattggttacactaatttgtaagtcaacaatgagcttgctacagagctgtgaaactgaattctgacccctgagggaggtcgttagcttgatctttctgtttttagatgggtcgatttgaactctatgaaaaagaccacaggaggccacttggtaaatagaaataacatattctagaaggaaattagactaaaatagaaacggcactaaagtaaaaattaaaattcatattcggtagaaattttatgccaccctctactatctcaagcaaactttctgactctgtgggactccccaatttactgaatattttctaaatatctgttcctggttcactaatgggccagggaagatgacacctcatggtgttcactgggctggtgtgggtgtttgatctcattgtcagccaatgaggaacctgaatctggggtgattacttcactcaattgtcagaactgagagttccgggttattgccacattctacgtgtttaggcttccatattgaaaatgattaactgtctaattaagaacatcttctttggggctgcaaactgaaatttatcttagctgctgatctaattgtcaggccattaatttagaagttcacaattagggttatgtctccaaagagatgaacaacaatcaagcctaaatccctgtctactgcagaggtcatcactgcatgccaggttggtggttcttggagaaagttgatctacgtgtcccatgtatggggaagtcccagaccatttctggcagaatgactgtcttagacttttgacccgttacttgaagtatttgtcactactgttgacactttcagcataaagatcagctgactccagccacattatgtgttacttgaagctaatccatgtcatcttttaggtatttgagaccgcttaaattctctctttttttttttttttttttgcttttatcaccatatctattaaaatgagccaatagtctcattttaacttattttcctcatcagggtccacagcttttggttaggtaatgtgttgattaaatggtttattagtcaccttctttggtcccagaagagattatctcctgttgactgtctctaagatatagataacattgttattgagtaaaaggagctcacttcttgaagtgctagaagccaatactatgacatcaggtttttaagagaaagcaattttatactgaaacgttactctcaagctcattgcctcctcatggatgtcatgggcaaactgaaggggagttgtgatgaaacaggcagtgaaaattcagacggtgacctcagcaaggtgattctgccaaaacaccatttggccataatgattccaccaatttaagccagtttgtttatttcataagtagagggagtttcagtgttttggcaagttgtgtttttgttttttttttcttttctgttattctgcaagctcaagattttctgttagatactggctttcttttaactctgcagaagtgttgcaaaatgattggggctataggaatctattttccaaatctgagtttccacactgacattcctgggcaagatgtgatttctcctaactgcaacctccaggcagcctggtttgtatgatttctgagtagcagcccagtcaaaaaaggggttatggaactccaatttagttctgattatggtgtatataaacattcttgtctctattacaactggatctactacataaaatgtctacagcaaaataggaggggatcagataaaggtacaattataagtattggaatggatcacattaattctgaggatatagaaggggagcaacaacctgaaaccaggggagtgaacgacttagatctcaggagctatgggaaatggataggcatgaataacctcttttccttctgaattgcccctggcacactccagaaaagtctggcaataattttgggataggatgagagtagggttagttagaccaggtggaagtgcaaagactaagtttattttttccattccatcccccatatcacccttaagaatcctttgggctgggcacagcagctcacacccagcactttaggtgaccaaggagggtggataacgaggtcaggaaatcgagaccatctggccaacatggtggaacccagtctgtactaaaaatataaaaattacccaggcaaggtggcacatgcctgtagtcccagctatttgggaggctgaggcaggagaattgcttcaacctgagagaccaaggttgctgtgagctgagatgatgccactgcactccatcttggatgacagaggaagactccatctcaaaaaaaaaaaaatcctttgtaattatcccatttctctgcaatgtagtaatgaaattctagtgaggagcatgcgttctcagtgcccagttgtctgaggccacagttgagttgcttcagggaaaaaacaaacaaacaaaaaaaaaccaaaacgaaaacacaaaagcaaaagcaaaaacaaaaacaaaaaaccctattgcttttgtttttttctaaaaagattaaatgccccatggtttaaaataagctggctctacaaaacattgaattcatcttttattttctctgtgagcagaggctcctccttctgtttttctaccatctagagatgaatctatatttgtcaatattgacataaattggagacataaatcatgtaagaaccctagacaagccttcaaaataatctgagtcttgctcgtttctcttctcaattatgttgtcagagagagctacctgagatgaagtctctcaggaatagttagaacattgcacttctagagaagatggtgagacagggcaagactcacagtgagaataaaagcttcttctcaatctttcagtgtatctgtttctggtagatgaatccagaaaagattccagagccagggaagagctatttgagagggtagaatcactgtagatcagagtactaggtcatatgtttattagtcaccttctttggtcatattctcagtgctaagcctctgatagggcttcagagcaatgtatgcctgtgaaaatctctaattccatttgaaagatgaagttctggctctgggagaagtctcctatctgacagaacatcatgcttctgtgggcatgagattctgtgcccttcctcagcagacaccactgactcaataattgtttaagaatcatgcataaataggccttccttatcatgaatctcttaaataacaaaacagagaaaacccatttatccacgttcaaattgaataagagtgtaagaaacttcacagaaattgttatagaaggaaactcttgggctctgtccatctccagaaatctcaaaattctggcacaatctgttacaattaaccttatcagagcttgaattttttttttgctatatatatttacctttaattggaccttaattttgttatatgttttaatttaattttatttttttgatggagtcttgctgtgtctccgaggctgtagtgcactggtgtgatctcagctcactgaaagctccacctcctgggttcacacctttttcctgcctcagcttccctagtagcggggactacaggcgcccgccaccacacccagcaatgtttttggacttttagtagagacggggtttcaccgtattagccaggatggtctcgatctcctgaccttgtgatccgcctgccttgacatcccaaagtgcttggattacaggcttgagccatcatgcccggccaaggataaaccattgtttaacctttgtgatagaaacatcaaattcccatatcccaagcattaataatactgtccactgcaattgttattgcttattaactttttgctatggtctggatatttgtgttcctcactctccacattcatatttaaaaacttaatccacacgtggattcagtgtgatactattagttattggaactttgagaaagttattaagtcaggagggctgcatgttaacgagaaaataatagtgcccgtgtgacggaggttgaaaggaatattcatgccccttctgtcgtgtgaagacatagctagaaggtgctacttgtgaggaacagaacctcacaagaaagagcctcagaaagttgttatacagcagaacatctttctctcttgagagattctggccaacagtgctgcatggtggactgtctttagaatgtgagtttttggttaccagaatacttagtactgttaggacctttcaccaaagaaatgaggtcacttcttgaaggtattattcttctttcaataagacctatcttccttcaataagacctactcaaaggcttttctgcactgctgactgctcaccattctctcccaagtcatctgattacttgtgcacaattatgcaaatacagcacctcctgcaccagtgccggaggaaatggaatgcagccagagccacaagtttgaggatacaagctgagttaaagtctttatgtttaatgtattaattatgtgatgccaagtatgtcattgtgcctctcaggggctccatagtctcacagcctgcacagtggggattatggtggcatccagctgcaagggatctcatgagatatgtataaaatgatacgcatgactgttgggtttgatattaaacacagctactgcataaacttagagaaagaaactacaagggatgggacattgcttgaatatctctcaaacatgcctgggttttataacttgaatcttgagaaagtcatgtcccctcttgaatttatttttcaaactccaccatgaaaacattgaaattgaataaaatttagatgttgttattctttggccagaacaacaacaataacaacaacacacattgtagtaccttctcgttatatttagaatcaggcccatttgtctcaccttggcatacgtagtgcacagccttcatgatggctcataataatttttatttccaactatacacacccaaatgtaaacagtaagtggttagtgactcacttcatggcagtagaatacattggaaaatagggaatgtcactgccaatatttgattatgaaaagattgtcacttgcttcttactttctctctcttgtgatattgtttacttccttttttcctgtctttctctctgtctgtcgcatactttgctctggagaagcgagcttcagtgttttaagctttcatttttacaggcttgtgtgacagagaatagagagagtgccctgaccaaagacagaaagaaactaagaactgagtcaaaacaataatgcacaactaaccagattgagctcagaagtgcatccttcccagtcaagcttcagttgagacacagcttcagtctcatgagtgagaggtgacagcatgctggcagccctcacagccctcgctcactcttggtgcctcctcagccttggtgcccactctggccgcgcttgaggagcccttcagctcaccgctgcactgtgggagcccctttctcagcaggccaatgccggagccggctcccttatcttgcggggagcgggcaggaaccgcggctgcccgcggtgcttccgggccagcgcgagttccgggtgggcgtgggcttggcggccccgcacttggagcggccagctggccccgccagccccaggcagtgaggggcttagcacctgggccagcagctgctgtgctcgacttctcgccaggccttagctgcctccccacggggcagggctcgggaactgcagcccaccttgcctgagcctctcccccactcctgccaagggctcctgtgcggcccgagcctccccaacgagctccaccccctgttccatggcacccagtcccatcgacaacccaagggctgaggagttcgggagcacagcgtgtgactggcaggcaggcagctccacctgcggccctggtgcgggatccactgggtgaagccagctgggctcctgagtctggtggggacttggagaaactttatgtctagataagggattgtaaatacaccaatcgacactttgtatctagctcaaggtttataaacacacaaatgagcaccccgtgtctagctcagggtttgtaaatacaccaatcaacactctgtatctagctaatctagtagagacgtggtgaactttgtgtctagctcaaggattgtaaatgcatcaatcagcaccctgtgaaaagggaccaatcagctctctgtaaaacagaccaattggctccctgtaaaatggaccaatcagcaggatgtgggtggggccagataagagaataaaagcagctgcccgagccagcagtggcaaccctctcgggtccccatccacactgtggaagctttgttctttcgctctttgcaataaatcctgctgctgctcactctttgcgtccacactgcctttatgagctgtaacactcaccacaaaggtctgcagcttcactcctgagccagaaagaccacgaacccaccagaagaaagaaactccaaacacatgctgacattagaagggaaaaactccaggcacgctgcctttaagaactgtaacactcaccgtgagggtccgcggcttcattcttgaagtcagtgagaccaagaaccgaccaattccggacacatgaggacattgtggtagacccattcaactaagctgtgtcagtatttgtagccaacagaaaataagacataatgcatatttggaattttaagccactacacattgagctaatgagtagaattattttttctaattttatttactgattgcccttagttactgtataaaagtgcaatttaatattgtgcatttatcttgtatcttgtgacctgctgaactcatttattagttccagttgatttttgtaaactctttaaaaattcttgaatataagttgatgccatttacaataaaagtttattttataaatttagaagttttatttgtttttattatataatttctctgcctaacacctttagttcaatttagtagagtagcgaaagtagccatgcttatctgtttcccacaactgtgaggcaaagagcctagtctttcatcagcaagtgtaatattagtgggaaatttttatgaatcctttttagtagttccagtaagtttttccttcctagtatgttaaggattttataatgaatcagtgttgtttgtatcacaagcttttctgtgtctattaaaaggatcattttatgttcttcactttatcaatgttgtgtattaaattattggtttttagatattaagccacttcatttgtaaaaagattgtacttggccatggtgtataattacttttacgtgtttctgtatttaacttattagtactttttgagaattatgtgtctttatttatcagccgtatgtacccatattaatcctaacacatgatgggtttgtctggctttggtatagtaatattggcctcataaagtagttaggggttgtttatctcttatctatgtatggtgtgtatttgtaaaggattggtatttttatgaaatattttgtataatttaacagttaaagtatttgactctgatttttctttgtggtaagatttttaaaataatttaatctttcattataggtctcatatctcccacttcttgagcttcatttgttaaattgggcctatcaagttatttacttctaatttgtaacaatccatgtttccagatataggcagctggtatgcctgttatgtgggataatgtagctttgtgaaagttttacgtattatgtgggataatgtagctttgttaaaatcaataaatagccaagtttttactcagcttaaggattgagactataatttttatacttcatacttgcatgtattgcctgagtcaaaaaagctattacatctaaaagaaaccagtgaaacatatcatttgacatgaagttttatcaaaatgacacattagcctaacccctttttcacaaatatttagaaaagaaaagaataaatttaaataagattacaaaataatttagtcaataaagaatattataaggaataaaaatttaatgaatcagggttattagtacttagtagcccctacaatgttttagaaattattctaagtcatttacccacatatacttaatagctgagtctaaaacatataatacagaaatttgttaataatgacaaattgaaatatttacaattatattaaatgacattaagaccatcagaaatcaaatgtttaacatacagtaactaaataaacacaagtaatgataactttattagaaagtatgactactagcaagagagaaaaattaataaaatttttcagcagtgaaccaaagatacacactgtatgacagagggggaaaataaatggcaagggtttaggcctaacaatatcattcattttatgagagcagaaattcaacagctcatatcttttaggacactaaaatgacagtagaaattctaaattgtactcaacaagtaatatttagccatgcacaaattttgtttcattaaattaatttataaaataaatataagatttcatgaattatttttgtgaggtcaaggacatactaaaaggaagcacagagttctgttctctgtagttaagtatatattttcataaaggcacataaaagaaaattttaagtatcaaaagaactaccccttacaagtgactattactacatatttgagagagatgttttgaatgaagaaacggaatatctcataagatgtggttgtatgctgcccaatgcctatgaaatattctactcatgtgtacactgcatatttgtgctttcagaagaaaaggctacatatttttaaatattttagtgtagacaagtaaaagttctcaagaagctacaagaactatgaaaataatgaatacagtttaaaaatatagaagcacttgatgaaagctaaagtaaatcaagagaataagccagagaagtaatcaaactgaaaaaaagtggtcccttcagatactgatagatcacaaggatgtcaagtctgtatgctgtccaccttcctccaagggaaaatggaataagcacagaaataacatgactacagacatctcaaatgtgatatttcccaaatattggaaccaagttaaaaactaaagaacacaagtaaataaaaagaaatttctgaagaaaaactaggccaccattttccatattcaaatatcatatttgaatcacagctcggtagaatgtaaagaataaaaaaattaggacaaggtataggtgaaacactaaattaaacagagataaaaaattacctgagtattgaatagaatgaatataaccaaatatagtaaagagagatgacatatcataagatatagttttaacaagataaaggctgggatgagacgctaaacatcttaattattttattagaacaaaaagtatgaatgaggcagagcaaataaggccagccagatccaagatttgggaaaagaaaatctttccctccatggaagcagcctcaagtgtacattgcagagggcccagatcagagaggaatgagaagtggttgccattcttgcaatcagtgttatccgttttcttgcagcccaggtttatataactgttctaagtccagtaaattgtctatagctgcacatctattaagaggctgagacagcagtcaggaccaactttgctaaatgtccataaactactctacctcatggaaattctctggatcttggagactctggagagtgacgcttctgcaaatagaggcataatttatttgagatttttatccatctgttattatcctttactgttaggaataatcttctctgaaaaatgcttttgacccaccttggaaggtcttttaatagtttgggaaagtggggcatggcaaggtggctcatgcctgtaatcccagcactttgggaggctgagatgggtgaatcatgaggtcaggagatccagaccatcctggataatacggtgaaaccctgtctctactaaaaatacaaaaaagtagtcgggcgtggtggcaggtgcctgtagtcccagctacttgggaggctgaggcaggagaatggcatgaacacgggaggtggagcttgcagtgagccgagatagctccactgcactccagcctgagagacagagcaagactccgtctcaaaacaaaaaaaaaaaaaattgggaaaatggctgagggctgaggttagaaatccaaggtaaaacattatgttatatattttacatcatagaagaaatttgagaacacatagaatacaatccgctattcataattttttttgagcattttcaggctatgtttttgacatagactaagttgaattactgtgccagagacaatctcgtgtctaaaagcaagtgacataaaaatagatctgcaaagatacattttctcccgctttaatttaagtaaacagctgagtacatcttcaagttgtactttgagttcagtaagataaatctgttttttaagactccaaatctagcactaacaatgggtcaaatccctgcaacagacatgaaaatcacaaacagctaatgcgttcctcatcctgaaattctcgctgccagcacagcagtctgaagttgacctgggccaattgaggtcagttggagggagtggagtccaccattactgaggctttagtagacagttttcccctgacggtgccaaggaggctggaaggtccgggttgggtgcagcaaagtggctgtggcagactgcttctttagagtcctcctcattgggcaggtcatatttgaaggaaaggtaacagccctagtcagaggcttacacagaaaacctctatctccctgggacagagcacatgggggaaggggaggctgtgggtgcagcttcagtggatttcatcattcctgcctgctggctctgaagagagcagctgattttgactagagggattctgccagcacagtgcaccagctctgctaagagacagactgtctcctcaagtgggttccccgtgactcctgactgggagaaacctcctaacaggggttgacagacacctcatacaaaagggctccagttggcattgggcgggtatcctcctgggatgaagtttccagaagaaggagaaggcagcaatctttgctgttctgcagcctttactggtgacacccaggtgaacagggtctggattggaactccagcaaactgcactggacctgcagaagaaccttgctgttagaagaaaaactaacaagcagaaagcaacaacatcaacatcaacagaaaggacccacccaaaaaaaaccccatccaaatgtcatcagccccaaagattgaaagtagataaatccatgaagatgaggaaaaaacagcacaaaaatgccaaaaattccagaaacaagaatgccttttctcctccaaatgatcacaacacctctccagtaatgacacaaaactggatggagaatgagattgaagaattgacagaagtagtcttcagaaggtgggtaataataaactcctctgagctaaagaagtatgttctaacacaatgcaaagaagctaagtatcttgataaaaggttatgggaactgctaactagaataaccagcttagagagaaacataaatggcctgatggagctaaacaatgcctttaagttatatgggactatgtgaaaagaccaaacctacgattgattggtatacctcaaagtgacgggaagaatggatccaagctagaaaacaaactttaggatattatccaggagaacttcctcaacctagcaagacaggccaacattcaaattcaggaaatacagagaacatcactaagatactcctcgagaagagcaactccaagacacataatcgccagactctccaaggttgaaatgaaggaaataatgttaagggcagacagagagagaagtcaggttacctacaaatggaggcccatcagactaacagcagatctctttgcagaaactctagaagccagaagagagtgggggccaatattcaacattcttaaataaaataattttcaactcagaatttcatatccagccaaactaatcttcaaaagcaaaggggaaataaagtccttcacagacaagcaaatgctgagggattatgtcaccaccaggcatgccttacaaaatctcctgaaggaaacactaaatatggaaaggaaaatatggttcaccactgcaaaaccacaccaaaatataaagaccaatcgatactatgaaaaaactgcatcaacgaatgtgcaaaataaccagctagcatcatgataacaggatcaaattcacacataacaatattaaccataaatataagtgggctaaatacctcaattaagagacagagcctggcaaattggttaaacagtcaagaatctttggtgtgctatattcaggagacacatctcacatgcaaagacacacataggcttaaaataaagggaaggagaaatggcaaatggaaagcaaaaaaagcaacaacaacaacaaaaaaagcaaggtttcaatcctagtttcttgtaaaacagactttaaaccaagatgaaaaaagacaaagaagggcactacataaaggtaaagggatcaatgcaacaagaagagctaactatcctatatatatacctacccaacagaggagcactgagattcataaaacaagttcttacagacctataaagagacgtagactcccacacaataacactgggaagttttaacaccccactgccaatattagacagatcaatgagacagaaaattaacaaggatattcaggatttgaaatcagctctggactaagcggacctaatagacaactacagaactctccatgccagaagaacagaatatacattcttctccatgccacatagcacatattctaaaattgaccacataattggaagcaaaacactcctcaacaaatggaaaaaatggcaaccataacaaactgtctctcagaccacagtgcaatcaaatcagaactcaggattaagaaactcactcaaaaccacataaatacatggaaattgaacaacctgctcctgaacgactactgagtaaatgacaaaattaagagagaaattaagttttttttgaaacaaatgagaacaaagagacaatgtaccagaatctcttggacacagctaaagcagttttaagaggggatatgctagcactaaatgcccacaacagaaagctggaatgatctgaaatcgacaccctaacatcacaattaaaacaactagagaatcaagaggaaacaaattcaaaaactagctgaaggaaagaaacaactaagatcagagcagaactgaaggagatagagacaagaaaaactgttcaaaatcaatgactccactagctggttttttgaaaagattaacaaaagagacggaccactagctagattaataaagaagaaaagaaagaagaaacaaatagacacattaaaaaatgataaacaggatatcaccactgattccacagaaataaaaactaccatgagagaatactatagacatctccacacaaatcaactagaaaatatagaagaaatggataaatttctggacacatacactttcccaagactaagccaggaagaagttgaatccctgaatagaccaataaaaagttctgaaattgaggcagtaattaatagcctaccaataaaaaaacgctcagaaccagatggattcacagccgaattttaccagaagcataaagagcagctggtaacatttcttcttaaactattctaaacaattgaaaaggagggactcctccctaattcattttatgaggtcaccatcataatgataccaaaacctcgcaaagacacaaccgcaacaaaaatttcaggccaatatccctcatgaacatcgatgtaaaaatcctcaataaaatactggcaaactgaaaccagcagcacatcgaaaatgttatccaccatgatcacgtcagcttcatccctgggattcaaggctggttcaacgtatgcaaattaataaatgtaatccatcacataaacagaaccaatgacagaaaccacaggattttctcaatagatgcacaaaaggccttagattaaatttaatatcccttcatgttaaaagctctaaataaactacgtattgacggaaaaagtctcgaaataatcagagctgtttatgacaaacccctagccaatatcatacttaataggcaagtgccggaagcattccctttgaaaaccagcacaagacaaggatgtcctccctcagcactcctattcaagatagtattggaagttctggccagggtaatcaggcaagtgaaagaaataaagggtatgcaaataggaagagaggaagtcatattggtaccaaaacagatatatagacagagggaacagaacagagacctcagattgcagggatatggaggaagctggaagccatcattctcagcaaactaacaggaacagaaaaccaaacaccacatgttctcactcataagtgaaatttgaacaatgaaaacacatggacacagggaggggaacatcacacatcagggcttgtcagggggcaaagtgaaggagagcactaggacaaatatctaatatatgtggggcttaaaacctagctgacagtttgatagatgcagcaaaccaccatggcaaatataaaactatgtaacaagtctgcacattctgcacatgtatcccagaacttaaagtataaataaataaataaatctccagcaaggaaggaaaccagagatcaggttggagtcttgctattcacatctgagtatacagactcactccccaactctcttatttttattctgccagctctgacctgaatatgaacataacaaacacacaagagttccaacacctgacaatcggcttctgcccaagaagtgtgccctctcttttgtccatcctgcaactcatggtacaaagaagtggtgtggggctgcccagatgagatgatgagagaggcctggcctcgatggacatgtcctgggctgctctgtgttatctgtaggtgcacttggccaatggccaggggtatcaggaatgagggctgagttgatatctgtgttatcagagaaggcttttacattgaggctttgtaaggctagaactcagaaatatcaaggcacaatgaaaggacatctcactctcttgagcatctctcaccaacagaggtggatacagagctgtctcaagaatgtgggttcctggtttcttaactgctgtggggttctgtcaccaggaaagtgtgttaaactcttcaaggttccatctactgggccccttatttctataagacctacccaaaggccccactatgctattgattgctcagtctcctcttccatgtcaactctttatttgtacacaattatgcaaacacaacttccccttaattccctggaaagacctaaatgcatcctgggttccaggatataagagacagctggaaaataaccttgtttttcttaccatctctgggacctaataaaagtcactgtgtatttgaggcttccccagcctcctagcgtgcacagtggggataatgttatctacttcctagggaatgtatcagatgtatataagataaaatgtaaaaatcgtggtgtagtttcacatgtaaataatgcacacacttagagatggaagcattaggagaataggtgggaggtagcatgggccacaactcaggtaggcctggggtccagcagtgtaatcttgggaaagtcacttccccactgggcttcagtttcattctgctgcagtacgaggttgaaattaaatgtagatatcatcctctggcactgatgtggtttagctgtgtgtccccacccaaacctcattttgtattataacctccaggtgttaagggagaaacctgaggggagttgattggattatggggacgggtttttcttatgctgttcttgtgatagtgagtgagttctcaagagatctgatggtttcataagcttctggtgtatcccctgctctcactcacttcacttgttggccaccataattggaaggtttctgagcctcccccacccaatcttgtggaactgtgagtcaattaaacctcttttctttataaattacccagtcccaggtattccatcattgcggtataaaaatggactaatacaactattaaactttctagtgacttcttattatatatagaattatatccatgtgccttatctcacctaagttggggaaagccttcacaaagtctcccagcactaggtggttagtgactcagtttgttattgaacaaaatgacctactgctcgatgccagtagtatggcacttgggttttgagaaaaatggcatcttgttgtaggttggccaacaggagacaggagtccagctgaaatcagtttccttatataggctttaaggtgttgattaaaaaatgcttaagaagtgggctctggattaggaggggattgctggaaggaaagtagtaatatggaaagtcatgagacatgcacagtcatctcctcttgtttcctcacaggtcacatgaatattcagggagtgttaatatgaaacatgcaacggaaatttgggctctaacatcagcaaactcattctccatggacttcagttggccatattgcttccaacatatttcagccaattttttaaaatcttataagcagaggagatttaagtgtttcaacaagctgtttcttatctttcattctgaatatccaatttttaagtcttttttttttaacagtttgaaggcacaaattcagcttctgtcaaatggaatacagaatagtgtatgacttttgtattagttcaggctgctataccaaagaaccatgaactagacagcttatagacaacaggatttaatttctcacactcctagaggttggaaatttgagatcagggtatcagcatggttgagctctggtgatgactcttctgaatttcagactgcacacatcaaattttattctcatttggtagaaggagacagacatccctctggggtttcctgtgtaaagccagtaatctcaatcatgatggcctcaacctcaggagttaattacaacctatctccttatagcattacactgggggttacaattttaatacaaattattgtaactctcaagtttttttaaagctgtcattattcctcctactgggtttttcctatttgcttcctcagtctttccatttctttatgtctctttgtgtgaaactgtttgcctaattctgtctctcaattgtattcctcaaacagaggaagcaagctccaatgctatgagatgctctatgtacagacgcacataacaaagaacggagggagtgctcaggcagtagacagaagtaaagtcatgctctcagtctaccctgaaccctgccaattttcacaagcatgagcttaaaggttgatgcttttccggtccacattcagttgagaccacagccccaatctcataagagacctgaaggcagaggcagctaactaaactgtgtccagattctggtccacacaaattgtgagatactatatactattgaaaggtgctaagttttagggcaatgttgtcagaaaggagcagatatctagcctcatctcccaagccccaggattctccatgcctctgcttatctcttcctcaggctgtctgtaccaaattggtccctttctaatctctgccaaactcacacctgtaagactcttcaccaagggtggcttctcactgacacattcttgtgcagagatgcctccctgttatcattctcatcatggattaaagatcacctcagtgaggactttgggtccccccattcaatgactttgcagctcttcttctcaacattctactttatataatagtccttgctcttttcttttatatatacttgctttagtgcttttgtcgagctgacttcagactgttctgtccttggaggggtatgcaggcatgatgtaatcattttctgtgccacatgttggacccaccagggtagctggcaaagggtgagtgcaagggaaaaaagattggctaagtgggcaatgtggaaattgttgataataacatgaggtgtgtgactcttacttgctccagctgctccagcaaagctcaataggcaccagaaacacagcaggctgtaaccacctccaggccatcactaacactgcagccccatgcaggaacattatggaacaaatcaggtaccattgttttgtgtcctcaagacactgactctttggagttccagaggacaaaggagcagaatctgaaggctccaagtacactgagtgaccttggaatcctccattgccctctctttgcctccaccatttggagtgtgccatttactcatgaggcaccctccccttatccagggaaattatttaatacgactttcaaatgaggagctcaaaaacccaacaggaactggcattttcccatgacttcagactcagggtccagtgttctgacacgtttagctctatcccatctttatctacccaaaatgcctctggagtggccatgcctctctctgatttgaagggcctccagggagtagaagcatttctgcagagtttcagagcaaagagtcttagttcaccaatgaagaatcaaggctggcagacacttatgagtatgtgaaacaatcaaggttacccacttcgagcacccctatttatgaggaagaaaacagtcttctctgtagccattgtctacattaggctgaggtggagcatagctcattttacttccagctctccacagaagtggatacagaaccccagtcctgtcctcttgaaaccgacctggagaggaccccatgtgagacacaaccctggaactgctcattctctgtgcccctggatatgtatctagggaagcggatgcccttgccttatggcagatctgcccgcccagctattcatttgtaatacatggcctttaatgctttgaagtgaatttactttacacctaatttgttgagagtttttatcataaagcgatgttcctttttggaaaaaagttttattcgtctatttaaatgttatgcttgatcctgggtctgtcgttctgatcagaagctgacaggtgcatccattcctagaggagagcatgagaacatcagttctcacattctgtgatcatgacctgcttataatgtccactctgagtgtctgactccctgaagtaaattgtggcccaggaactgtcatctgttgtcttcactgaattaggccaagtgtctggaaaactgcgttatatatatgtgatgaataaataagccctaactacaacctttttagctatgtctgagtgtgcctggggactctttcctacaggatctctctgtttcaaggacaaagtccagctaacaggaagctcaagtgccctttacaaatgtaagaacatgtttgttttctatatgattgtctaattatagagggacatgagtcactgtgacatgaaagaccttctggggtgaaagaagagaaaaaagtaataaatacgaacaatcagagcatgccccagcaggctttccacaaagccgagcattaggaaaccacttttcatattgtatgccattcatttctcacaaaaaacatataaggttgtgggggaaagttaaatattaaatttgaattcaattgaacatggacaaaagcaatggtcattaagtctcagacaggttgcatgagccgcttgaagcattcatctggcactgttttggagaaatatctatttcaatctattcctatgtgttagttattgaaaaaccacagacaattgcaaaaacaagataaccttttcaagttccttgagcccagttgtgaagagccctcgtgactgggcctcatgccaaacaactcattacaaaaagaactagggctctaggccacgctgaaacttcctaagacctcttcttgtctgtgcagggatgggtgacctactctggagtcgaggctgttgcttcccggtctggtaatgaatcctccgcagtctggtgggcgtaaatatgtatatatgtttcccttctccccttcccattgcaatttgcttattatagctgcactgccatttacgtcagataaagcttgtttacccttaaaggtttttttgggtgtgttttcttctccccttgcatgtctctcgtacagaacagaggttcattttacaattctctataaagatgcaaattgaggctgataaagatgcactggtatgctaagacacagttagtagctggcagagtcaccactgtgccttggagaagacatatgctcaactactagacagctggtccaggaactacagagtggtgaggaagtcctggtaaaacttgagaaaaatgataaaaagaagagagtttgaccctggaaggctgctgtcagggacttcgtcagcttctccgttgtgcctggtttggcgcattggcatcattcacacctctaggttaagaatagactcatttcctcttggggaggggacaagacttttcatggcaagaccatgaaacaccagaggcttggaatgtggagcttggatgaggaaatctccatccttcagagacttgggcatgtggaggacatgggtgtttatggtgaaaaaggttttaggcctctgatatcaaatttaatgtggaggtagagaataattaatccatgaatacagtcaaggccttcacgatatcatatcagctgtaagacaacagcacccacttgtattaataatctttatgaagagcattatcccagagaattcccaaaaaaacatactcagcctacaaatgagaaaataaagctttgtgatgtcaaatggctgctcagaaaaacacaagtaagaaagagaatcttccacggtgggggttgcatgaaattccctttaagctacctgaggctctatgtctgtccctgacttagggggaagggcatggggaaggctcactttctttctgttttagagacagggcacaggataagataccctaagacaacccttttgacttaaagcaactgaactgggtcttttaaaaccttaaagggagtgttgagaaataactacagcaaccccacacctgacaaaggtgtcagtgcttggggactccaaggtgagagaaacccctcacagggccaaggaattgagcggattaactgagggaacagaaaactcaaataagtataaatcaactgaaaggtaactcaaatatatcagttgaaaaattgaaatagaaacatgtttttttgccacatagatagcagattgacaaaaaaattaaaagaatgttgacaaccaagaggttctggatacataaaagcagataaattcagaaactactatttacagtacggctttcacaacccttttggaatatattccggcttctcctattaaacctttacactttcctactgtttcactgagtaatcattttcctgggagactataatctacaagggattagtaaatgttgtgagctagattgcattcccttcctaaaaattatatgttcatgtcctaacacctagtgcctcagaacatgactatatttgaacatatagcctctgcaaatgtagttaggtttaagtgaattaattggggtgtatcctaattccagatgactggagcccttattagaagaggcaggaaggacagaaaagcacaagagaagatcttgtgaacacagatatagtagatgacgatctacaagccaaggatggagacctcagagaaaccacacagccagtagcttgaggttggatttctaacttccagaattgtgcgacattcagtttttgttgttaaagaacttcagcctgtggtactgtattagggaagtcatagcaaagcgttacagcctattaggacacagataagatgttccctgtagcggctgggcgcggtggcttacacctgtaatcctagcactttgggaggccgaggcgagtggatcacgaggtcaggagatcgagaccatcctagctaacacggtgaaactctgtctctactaaaaaaaaaaccacacacacacagagaaaaaaaattagccgggcgtggtgacaggcgcctgtagtcccagctactcaggaggctgaagcaggaagatggcgtgaacccaggaggcagagtgcagtgagccgagactgcaccactgcactcccacctgggcgacagagcgagactccgtctcaaaaaaaaaaaaaaaaaaaaaaagatattccctgtagcatggctgaagtggaaatagaatttattatgtcaggctccaccagtattaaaagcctaaattactgagggaaaggccccacttatggaatcttataaagacatatgaggacacagctcctgtcctgatggggctatagaggtgggctctgggacacatatgtaaagagtcatataagacccttttgcataactcccactttttgggtgaaacctctctctagtaacagtgtgaacttctaagacttagagaaggtctggcaaggcagcgaagctgcctgctccaggaagtatgtggggtaggtagatataacaataaaaataatagcaaaatgcaaagatactcacaacttaatgtaaagtaataacaacacaaaagtgtttcttttgacattcctgcaagcatatgaccagggactgtgcacctaagttgccattatggactaatggaggccaaattcctctgggaaggaactgtgggtccttaatggagaaagccctaaaacggtttctggggaatcctcacatttgggtcagggtcctgggcttccctggtcttttccatttggagacctctctgtgcccaccttgactccagactagcacgggccatggttgttggcatgatgcacctgccttttgttcaatgagatggagtagttggactcatcaaacagctcctcagggatctcctcaatagagttctgcaaagagagtgcctggaagcctggccaagaggcatcaatggcatcctggctttccccacaggggaaattccagttagaaagtctactccccagatcaggcacataggagcatttgcgcagacctccagccagggagaaaacaagaggacagcttgaagccttagaataaatgtctgaacaaacaaaggtgacccccagcactcaccttcccctcctgccaactgtaacctgcggtataaatttgacaggcttttagcctcccaatacctggaaacctgctcctgccaagaaaggacccattatctctttctttcccacgagacgtggagatgaggaggggtgtgtgcctgccgagatgatatcaaaggtgaggcctggcctggataggcctgccatgggtggccttgtgttatctatgggtaaccctttccaaatggccagaagagccagcagtgcagaatgagcactgtctccatcataaaaaaaagtctctctgttcaagccttcctgagatgagagcctcagaaattcaagacatagcaggagaacatcttgctgtcttcagagtctccttagtaaatacaaagctgtctctagaattagggctccaggttaccagagttctaaactttctttgagtttgtaactaaggaagtgaggtcacttcgagattccatcacctgggctccggtgcgggaaatgaacgaggggaaaagaaaaggcacccacaatagttttaaggataaatagcctttatcccaagtgtatggcaatacagacttgataagcaaataatataataagcaaattgcaatgggaaggacagaaagaaaatatatatatgtatatttatatacatatacatgtatataaatatacatatatgtatatgtatatttacacgcaccagactatggaggattcattaccagactgggaagcaacagcctgggctccagagtcagccacgtgtccatgcacagatgaggagaggtctcatgaaacttcagcacagtctgggaccctagctctttttgtaatgtgttgtttggcatgaggcgcagtcacaggtgcccttcacaactgggctcaaggaacacaaaagatcaacttgtttttgcaattgtctgttgttttttcaataactaatgtataggaatggattgaaagatttctctgaaacagcgctggatgaacacctcaaggggttcatgcaacctgttccaggacttcgtgaccattgtttgtgcccatgttcaattgagttcatattaaatatttaacttttcctccacattagattcccaattctcagaaccatgtccactgccacagggcctggctgggaatattgtcactcatagagtttagaagatggaatgctggtcagtgatgatgctagggtgttaggtgaaggcagccgggacagtccctctaggttgagggaggagctggcctctcttgtggggtccttggcatgtcattgccgctttgggcctctgttttcttatgtggaaaatgtaggaatgatgagcctgttgggcaggcctcacaaggtggtgatggggctcagggagacagagaatctgagggtgcttgtgtctggctcatcctgagagggaagatggtgacagcaatcatgacaaccacatgaaaccgaggtggtaagaggccttgtgaggtggttggttcccaccacactttccagttgaggaaacagctcagggaaacccgactgcatgcccaaaatgacacatccagggagtgttggacctgggagtgagtctagagtcagagcttactggagatggtcagagcattggacaagctgactcaggccacttatccgtgtccaaggttagtgtggctgaggcgtaactgaaagaagcatattttcactgaccttgtccctcatcctagcaggtgaacaccgtacaagttgtctaccctgtagcggagcctcagagagcttagatgaggctgtgacagcagaaggtgaatgtgtctgtgatggggaagggctccagggtttcagagaacagagcttacttctcccagctggaaacctccaaatcaaaaaagcagagggcctttctactccagcccttttctcctggggctgcagtgcctaaaacaccttcattagacagaccagagcaaggcctgggagagctgggctccgtgtggcttttaaaacaggtggagccagggaccacatgaccttgtggcttgttaaaatcccaccaaggaggtaattatggtgaggttggtggcaatagaggccagctaatgggaagacatagagaattgggaaaaggcagctgagggttctcagctactccaagtgggtaacctaggtagagggcgccaggaggcaggggtttataagagttcagcggacaggacttgggtgggcacctcccaagtcatgccctctctggggacattcctcactgatgtggtgatgctggacattgccatgaaggagtgtgtggatgtgagtgagcctggagaagacaggtcagggaccaggatcctgaggcctgggagaagagagtcttgaactgagctcctagatctcagtccttgccaaaattttttgcgagggcctcgcagccctccccatcccgtaaacagggtattttactcatgagtgatggaggctccacagcagccatcagtcccactccctgagtagtgaagctgcagagctgcaagacctcttttgtgcacattccctgaccctggtggctctggtagtggtgaagcttggaaatcgctggaaatggaggctagttatggaccagcggacctttctgatggtctttggctttctgtcttccagagaaatgtgatcaaaacccagaaaaacagaaaggtgagcagtagctgaagtcctcactttgagggagggtggaggtggaaatgagaaatcaccctgggcaggacattccctggtcccttcttccgcatctaagatttattgaaagggagtaatacacagagaaggaggagacctatcctaatgcagggtgcaatcaggggagtgaagttgatgacaacttcctagaggaagggccgtttacattcaactctgagaaccagttagggctgcatgatattggaggggaggtgagagccccttaaaagaaacacctcagagaccagccctcctcccttcttttataaggcccctacagagtctttcacccaggccctgtcagcatcctgtctttccctctgtttccagaagattaaagtcctccaggagatgcagcagttccacacagctggaaaccatcatcatcttcagactcaagaggaatttcgggctttgttccaagcctggagcagcacaatcagaataaaaggcaaagacctagcagatgagcagagggtaggaggggagactgtcttgccgccagcctcacacagcgtgtggccatggttccctggccggcatcaggtcctgttgcacctggactccagctgctggggaggaactgggggacctgaggtgtggcttctggaacctcacagctgtcactcttctctgaagttgctagccatgaagaacaggctgtgataaaatctcagagccattaagtgcctgttgttggaattgctttcatggctcattgaagtttgtactaagcatgggctctggcagtcaggcagctcaagtagggttccagccacaccattgaccagccctgcgagtggggcagaaagctcactactctggcacttgaggcatcacgtcgtaaatttaatgcaaccaatccctttttcactgttacctacctttctctataaacaccatgacctgatctctgctagcatttttcttaaaatggataaacatatgttatatagtatatattattcttcctcatgatttttttgctatattgtctctttccactcatatgagatatttacagcagttaagttcatagaaacacgaagtagaagagtagtttccagggactacacaaagggcaatggaaggggagtgttgtttactgggtacagagtttcacttttaaaagattgaaaaacagttccttatgaacttggacaatggttgcaaaacaatgtgaatgtatttaatttctttaaactgcacacaaaaaaaataataaaatggttaatttcatgtatttttatattttactaaaaggtaaaaactactttctaaaatgaacagactatagctatttgcaactggtgggtgaatatcacaaatgtaatgttgcataaaagaaagcagacatgccagtttgggcaacatagtgaaaccctgtctctaccaaaaatacaaaacaattagccgggcatggtggtgcaaggctgcggtcccagtgactcaaaaggctgaagtggaaggatatcttaagcctggtaggcagaggttgcagtgagatcatgccactgcacaccaacctggggaaaagaaagaaagaaaaaagaagagagaaagaaagaaggaaagaaagagagaaagaaagaagacagaaaaggaaagaaagaaagaaaacagaaaaggaaataaagaaaacagatgtacaagtatacatactatataattttgtttatataaaatgctacaatcaaataaaactgaggttctgacttccactaagtgtggactagcttgttgaactctcacaaataacaatgatgaaacttgaataaaatatattattatagaaaaacgcctatgcataatacatatatgatatgtgtgtttaacaactgaatgaagatttcagctatacccactgtagcggacataagcattggtttgacactagcccaatgaaccctgtttataaaacaaaagtcttcaaggtaaaacagcaaaatccagagtttctattctataattatcatttatagtttctagtgcacaattttaaaattcataagacttgtaaagaaacgtgaaaatgtcatccatacacaatatcaaaagcaggcagtagaagctatcccaggatgttgcaatcagcagacaagaatttgaaggcagtttttatgaatatgttcatggggaaaaaagaaaatattctattcataaacaaacagatgtggaacttcagcagagaaatgaacatatatataaaaaaattatagataaggaaatgaaaaaaatcttttgagtttagccatagatttaaaacagaagacacagcaatagaaattatccagtctggaaaaaaaaaagtacaaaaagtttaaaggaaatgaacagaactctcgagacctgtggaatgactgagtctaaggagaagggagagacaaaaaataattaaatagggaacagaagtaaatcaacaactaatagcggaatacttccaaaaactgtccaaatacctaaatatttatatccaaaaggtcaataaatacaaaacaaaatacaaataaaaccacagcaaggccatatcgtggtttatgaaacaggcaaggcagggcttttgcttgacttgctgtgatatctaattgctactatttatggatactatggaaataaatactaaatagaatgggagataggttattctcagagttttttttttttttttttttgcaaagatgactgttattaaaggtagatgactttccagcatgtcgaaaggggcgtggcaggggaggggcgaggagaagggtcggggctgagggaggggccctgcaaaggtctgggcgcgcccagctccccgaaagcaagcgttacagcaacgctgggcaggctgttggaggctcccgggctctgtcttgtcagagagaaatcaaacttcaggcacaaatagtcgtacaactggcacgtggggagactgtgccacaattacaagtgagaccacctgccctggccacgctgtctcctcgcacgcagaagtttgggaacagataggctcccctcagcagggcggaattgcactggaaacatggaggggcggaggagaagatgaaattatcccctcagtgttggaactgtagtctcagagaagatgaaattttccccgtagtgttggaactgtagtctcagatccactcccagcctttctgtcgcggcagtcggactatgatcccagcatgcgctgggcttaagggaggttcccagccctggaggaagggtcaacagggtgggtccctcgcaaggcgtcctgggagtcatagtccttaaacagtttccagcacgttgatcgcaaggctaccgaactacaatgccagcatgcaccgggattggggcggtgtgtaacgctggagggaaggatagagaggcgcgtccctggccagggatgctgggagttatggtctcttaacggtttccagcgatggcccccggcctgcagactacaatcccagcagccaccgggcttcgaggcggtgtgtagcactgaagggaaggatagggaggtgcgtccttagccaggcgtgctggcagttatggtctcttaacagtttccagtcagttggtcccaggactacctgactacaatcccagtatgcgttgggcttgggggcggtgcgcagccctagaggaaggatcgggacggcgggtacctcgcaaagcatcctgggagtcatagtcctttcagtatttccagcccattggtcgcgaggctaacggactacaatctcagcatgcgctgggtttgggggcggtgtgtagtatggaagcgaaggatagggaggcgcgtccctagctaggagtgctgggagttatggtgtcttaacggtttccagcccattggtcgccgacctgctaactacaaaaccagcatgcgctgtctgtcctaccccgtggtgcgcagccctggagggagggacagggcggtgtggactcgtcctttcctaagcgatgccacatgctgattctgtgccaccccctcgccaagggagtccgcagaaggacttgaggggcaggtctaggctgggcgatgaggacggtgtgaccctgcgaagtgcacctcccttgctcaaatcggaggggtctggtcctcactgaacagcccgctgaacatctcggtgtcctctcacatacacacccgcggggggtttccagagcatcgcacctcttccagcccagggagccgcctgctctgctaaactctatgggaactgagacatccacctgctgcgtgacccacccgtgcgcaacttcagagctttcagggggtgatgcgggctgtggctccttcgtgaaaatgtcaccgtctgcagcgcctttcttgtgatatagaacttgacgggtgagagcgggtatttcttgggttactcaggatctgctaacagcagaggagaaaaccacaattcccaggcataagaatctacctaaagacgatggtttagatattttacagttgaaatcaccagcctcatctcaactgagtcctgactgacgagtgtctcaaaaaagcagttggtgacctcatccctcaggaacaggtggtgctccagctttgtggggatgactttcaaggtgcagagcacttgagccgcatttgaagtcattcatgttttacatctctgctttggatggaaagttgatcccccacagccgttggggatgtaccttaatatactggggcttatgagttaaatttttctgtctagacaatgaaaacccagaagttccacttgcaggtagcctcttaataatcgacgtccctaagttccttatgtcctcaggatagttccttttgttcccagatgttaccaactttgatgatgcatctaatctgtataaacctgtgtatttctctatgtgaaaagaatactttgttcaaattacatgttcttataattttcacttgtgatcggtgagtatgggacactataaaaaaatcctgaaaaacctcatcatagcaattgaatcacgttactgtactttatgaggaattaaccccttcaggatgaattactcatgggttcatcagcacatttgtgaagaaaggaagaaaaactgtatggcctttatgaaattggaaaaataaagaactatatataggaggaccacagcacaatactagggcccttctcttattttaaatagactctatggggtcgaatgcctgcattcctaacctatcctgcagtattctcatcctactcttcactgtgtatttaggtgtgggtttctgaattcacttgtccacagcgttagtggggatgttgtaacgtgagggtatccatcatctatcatcttaataattagtgaagagaagagccttgagatctgtcttcagatacactgctgccgagtatgtgcctgcaaagacactgcccacaccggtggtctcagaaagttgaacctgatgccaccacaagctgctgttcacagatctaggtgctcctggtgatttgagtctcctgcttacatttgtggttgtgaacctgctatgctcaccccatttatggtagtatattttgtgtcaccttttctattccatttgtttcctgggaactcactgtgtagctgcaattcagagaatatgtagggattccacccccgactacctaagtcactgtacactggtcacatttgtgtcatgttttcagactacacactcttcctctctaatggaatttgttgaagaaatatagttgcctgtagatctcctcagtgtaatgtggctgggattgattgtgaagctgggcatgttgtccttggcctcatagacattattcaaaatacctttcccatattttgaagtttgatactactttgttaatgtgaacacttgccatagcaggctctattaaatatctctgtgaatttaactgtcaaaacaacttatgaagtaggcacatgatccccattttacaggtgaggaaacaaatgttccaagattttgagtaattttattaactttacacagctttctggtgcattttgaatcttaagttggatctctttctccacaatatatgggcttacctccttttctattttgtgcctctctgctagcatctgcaagggtacattttatttttagtacatcttccacttgatggtaggaaacttgacaaacagatccttagtgggagaggaaactcactggcatttgtccttctctctgctccttcttaccctggcaggcatgagacttatcaagtgagatggagcagtggtagatcctgaccagtcctcacctggaatatttgttattataaaaaaatagtcctctcattttttacaagtgtaacttctttgccttaaagttttgtctgggctttctcttacaggttcctgcgaattaagttgcaaatattgatgaagataatactactgccttgctgtcaaacagtaacagtcacctttttttgtatctccaattataaatgcaatgcgtactgtaaaaagaaaagaaaacatcataaatatctttataaagtaaaagtcttggctggtcgccgggagcagtgactcatgcctgtaatctcagcactttgtgaggccgaggtgggtggatcatgaggtcaggaatttgaggccagcctagctgacatggtggaaccccatctctgctaaaaaatacaaaaattagctggtctcggtggcgggtgcctataatcccagctacccacgaggctgaggcaggagaatcacttgaacccaggaggcaaatggtgcagtgagccaagatcgtgccattgcactctagcctgggcaacagagtgagactccatctcaaaaacaaaaccaaacaaaaaacttggttggcctagtggctcaatcccagcactttgggagcccaaggcaggtgaattgtttgagcccagaagctcaagaccagtgtgagcaacatggtaaaaccctctctctacaaaaatacaaaaattaaccagttgtggtgatgtacacctgtattcccagctactagggaggctgaggtgggaggattgtttgagcctgggaggccaagtttgcagtgagctgaaatcacaccactgcgcttccatgtgggcaacaaagtgagaccctgactcaaaaaataaaaaacacattaaactgaaagtcccctttattcccttctcttcaaactcactttttttatttgaaaaaactgttaagaggttgttttttattcttctggctaagttgtataaatttctttttttttcgagacagactctcgctctgttgtccaggctggagtgcagcggcgcgatcccggctcactgcaagctctgcctcccggtttcacgccattctcctgcctcagcctcccgagtagctgagactagagttgcccgccaccacacccggctaattttttgtatttttagtagagacagggtttcaccgtgttagccaggatggtcttggtctcgatatccggccccctgatctgcccacttcgtcttctcagagtgctgggattagaggcgtgagccaccgcccccggcctgttctataaatttctaagtgatacacacataaagtttattttaaaaattacatcacactacattaaaatttactctttctccaggtgtattccatctatctatctatctatctatcatctatcatctatctatctatgacaaggccttgctctgtcacacagactggagttcagtagctcaattatggctcactgcagactcaaactctcaggctcaaatgattttctaacttcagcttctgaagtagctgggagtacaggtgcatgccactactcctggttaatttttagtttttgtttgtttttttctttaaacagggtctcactgtgtcacctgggctggaatgcaatgcataatcacagctcactctagccttgaccactcaggctcaggcaattctcctgcctcagcctcctgagcagatgggaccacaaatgtgtattaacacacttggctgtttattattatttgcagagacagggtctccctatcctgcccaggcatgttgtgaactcttgtgcttaagcaatctgctacctcggcctcccaaattgctggaattacaggtgtgagccaccacaacttacccagcctttttactttgtgtaagaatagcatcagtgtattaaaaatacaacggaaattatttatggtgtcttttcaattcttatgcattaaaattctcttattagggccttttattaatggttacagtgtattttctgtgaaattttactgtcacacactgcatgccaatgattcaagatacccgaacttcatgaatgcacagtcacagtagaatattttagttatctaaaaagtattttcataaatgatatatcaagtttatatgcaaggtagcctggtctggtagcaggtgcttgtaatctcagtgaaggctgaggcaggagaatggtttgaactcaggaggcggaggttgaaatgagccgtcgtctcgccactgcacttcagcttgggtgacagagtgagactctgtctcaaaaaaagaaaaaaactttgcttgcaagattttatgagtaaatatgtttcttatttttctttacaattccatattactgtctcgattatttataataggttccagggcagcagttgattttattttgggttttacttatgtattataactttggatgttataatttccaactctgcctgtacacttcaagtcaatgtggatttttaaaaaaatgttaatagtacaaactattcatagattcaacttcgtaatgttaaaagcaacggcagctcctggtttaaaaagggaacggtggaagcagccggccattttatttaaaatcgcgttagatttttcagaaggatgatagttaagatcattaaatcccattactgcttctaagatttccacaaaatagcacattaaatcctcagtcctaaacaatcacgacagagattcaaaattgcctctcaatgtcaaggtaaacagcgcactatcttctcttgcaataaaggtacatcatttgatatacaagggagcatagcagtcagacacttacaagatcgtgctgtagaaataacttccatgttttcatccgccatgtgtatcctcacctctgtctcccatgcagtaacactatcagtttcctcatctgtcctttctactttcttttaaagaggaggctgattgcagacaatacatgacagaggcatttcaaatcagaaaggagtttcttgagatatacgtgattttagttttaagtagaatgtcctgaagagttttagttacaataccaccttcaagaggatggtggtgaaattcatagtaaacatttggcaaaatataggttatgaggcagccatctcctagaaacacttcatcggggtttatatatgaaatgtgaaatatcgtaggtttaatcctggcacagaaccaaaactgagtgcattgcacttgaacagctgaccaatccccagcacaggtccatatgaagaaacggagaagaaagaatccttttaaccacagaaaggtcttcatttgcccaaactgaaaaccaaatttcactcaggaaactaatgttgggtttaattaaaatataaatcggtcatacgttttcaaaattaaattatatatgtgtttgtctctataaatatgtccccaactttgctcatggcttatcttccatattttttggctgattttcagtggttgtcttatcttgtgtggatgaatagtcattgaaataatcttaatttcacaatgtgtttaattataaatctatacttcctttgtgtgagagaaaatcttttgtgaacaaaatttaatttttggaaagctttataagtccatatttttccttttaaaaattgcgattgtggtaaaaacacataatgtaaaatttaccattttaattctttttaagtgtatatttcattagcgttaagtacattcacatagttatgcaaaagatctgtagaacttctatgtcttgcaaaactaacattaaatgtcttttaagacaattgcccattttaccatctcttcagtccttgacaaacaccattctaactttttttttctatgagtttgtctacttaagatacctgattatgaatggaatcatagactgtcactttgttcctggcttatttcagttaacgtgatattctcaagaataatcatataatgtgactttttaaagactgaataatattcgactttgtgtatgtgccacttgttgttaatctcttcattggtcaagggacagctgggttgtttctgccttttggcttgtgttagtaatgctgcaataaatttgggtgtgcaaatatctcttccggatcatgtgttgtatattttaaatacatagccagaatggggtttgctggattgtataataatctcattttaaattttttgaagagctttcatactattttaaaaataggtttgatgtgatagattattgtgacttttctttgtatttttctagaagagagttgtcgagtatccttttaaatgcctagtcatttctatgtcttctttggagaaagtcatttcaaacatgtgccattctaaatcaagttattaactttttttgttgttgagttttaggaatttatatattttgaaaattaacacctaccaaatatgtgattagaaaatatttttactctttttagttatatgtatgtatgtatgcatatatataaccctatacaagacagggtcttgctatgttttcatggctagtctcaaacttttggtctcaagtgattgttctgccttggcctcctaaagttgtagaattaaaggcatgagacaccatgcctagctttcacccacttattaggtgacgtttgtatggcactaaatgttttatttgatgtgtagaatagttgaagcttaatgtagtcccttttcttggtcgttgttcttttccttgttgcttatgaatttgatgtcaaacttaaggaaagagttttaagacttatgtcataaacttttcccttatgtttacttctaagaattttattaggttttatgtttaagtattgaattcattttaaaaacttttctttttatatatgatacaaaggaagcatccaactttatttttttctctgtaaatattcaatttggaaaactctttgttaaatggattcttatttttctattgtgtggtcatggaaagcttacggaagattattttatcacatatgcaagggtttatttctgggatctctattctgtttcgtcatctatgtatctgtttttgtggcaataccacattgtttttatttttgtagctttgtatcatgattttgaatcagaaaatgtaatacctctttgttctttttaaagggtgtttggctagtcacctgtcctaagcaacgtttagaattatacacaaaaattctgcaaaaaaaataccattgggattttgacaaaaattaccttacatttttatatcatcatgagtagtactgacaacattttttttttttttttttttggagatggagttttagtgagtcactcaggctgaagggcaggggtgcgagatgtgctcactgcaggctccgcttcccaggttcaagcaattctccagtctcagccaccagagtagctgggattgcagtcgtgcaccatcacgtctagctaacttttgtatttttagtagagatagggttttgccatattcactaggctagtctcaaacttctgatctcaagtgatccacccactttggcctcccaaagtcctaggattacaggcatgagcctcatgccggccctgacatcttaacaatattaaatcacctgacacttgagcaagactatatgaaagattttgcttaatttcctcttatttacatatttgccacattttcttgcttttgaattctagtttcatttacattgtatggcttcagttttcttaaatttaataagacatgtatcctaacagaatgtaccatgtgtgatttagaatattgcagattttgctcctttaaattggagagttctgtaaatgctggttgggtctataatgttcaggtttggctttcttactgatattacttctgactattctagtcattactgaaagtggagtcttgaagtccaccattgttgtgttgctatgtatttcttgcttgacttctgtcaatatttgttttacatatttgaaagacgagaatcagttgaacctgggaggaggaggttgaagtgagcctatcgagagatcatgccactgccctccagccagagagaaagaaactctgtctctaaaaaaaaaaaaagaaagaaagatgtcagtgctatttatagtaatacaaaaatttaatgtaatttttgtcaaaatctcagtggtatatttttgcagatttttcaaattatatatatatgatttataaattattgttatagattcctggaaagttaatccatctcaccattacataataccaatctctctcggccgggcgcagtggctgacgcctgtagtctcagcaatttgggaggccgaggcgggtgaatcatgaggtccagagatcgagaccatcctggccaacaaggtgaaaccccatctctactaaaaagtacaaaaattagctgggtgaggtggcggcgtgtgcctgtagtcccagctactcgggaagctgaagcaggagaatcgattgaaccagggaggttgtggttgcagtgagccgagatcgtgccactgcactccagcctggtgacagaatgagactctgtctccaaaaacaaaaacaaaaacacaataccaatctgtctcttgttcatatttttgatttaaaatatattttgtttagtataattatgaccatggccctccaattttagctactctttgaataaaatatattttctttatactgttactttcaacttatttgagtccttagagctgaagtgactcttgtagagagcaaattgctggatcttctttgttcttaatccattaaattatttattaattttctttaaggtatttaactttttatatttgaagtaattactgcatttaatgaagttactttattatttgtaattgtcttctgtgtttcttgtagatgtgttatttatcattttttctcttactgctttatttctgtttgttgattttgtagtgacgtgattgaatttctttctcatttgcctttgcatacattctacaggttttttttggtaatcatcctgagaaataaagacttcataaatcatcttaaagttatgacagtatagaacaactatatttcaactgaatgcaaagttgtacctcttgacacccccactgttttattaatatcgcatattatctttccttatggtctatgatcacaaatttatgcagatttctgcctcatgttttaaactccatggcaatattttgaaagttttgtgcaccatgattatgacagtagagatttctttacctgtttatatatttacctttaatagagagctttctattttcatgtgctgttatgatgctctgcagcatcatttcatttttggacgtgatagactcttttacacttcctttaggactgttctagtggttagtaacacaatcaacttttatttatttggaaaggtttagtttttttatttctgaagtgatattactccagttgaaggtttttgtttggaagtatttcttcttgtttaattatcttgccatgtggggatttctcagctactttttaaaaataacctctttattacttttctcctatattgtttttgtaagactcctttcataaatataatggtccacttgaccatgtgcagtacttcccatactttttcctccattctgcttaaaaaatttgttttcatcactcaatatttataactacaatgtcatcaattgtgtaattttttctcctttattagtctgcttttgtgactgttgattaaatttttaatatagctattatgttcttcagattcacaattgttggtttttaaaaatctttttattgatatctcattttctttatgtatcacttcttctaatattcttttgttgtctatgttctgtttttgttcattaagcagttttttctaatcacattttattgaaaactgcactgaatgctaaatgtccatctttacaataaacaactacagtaacggtaattcgcactacactaaaacaaaacgtacttctgatagccattatttttctgtttgggacagtcttaaaaatttctcttttcttacaaaaacgggaatgtacctaatcaaaggatcaaaacaggccatctttttaaacaaaaagactatattcacaaaagactataaatagaacatgtaactaattgatgcaaatctaatataatttgttaaaatcagtcacatccaatacagctgaagtgttcttgtataaaacacaacgtgaagaaaagaagactttatcaatgtcttaaaaagtgggtttgttcatagacaatctgacaagttaccattaaaagtgtttcctgtgacataagaaaatgcaacactatttttcttgaacccttttagtgcaagacttcccactaaataaaatagcagaggatctgaaactgagaaaatatacttgattacaaacagcgtgtgaaacttaatacttttttttttttttttgcattatcagaggcttttactgaacttacaaccaacttgcccgctcagtatgcagttcagatgtgagagacgcttctctgtacaggagccggtactgtcttcaatcttatgtgtgaggatgtctaccataggcaaacagtttactccatattttctagtaatgtgatcttcctattaacaaaatgctgtaaccagtccctgtagactgaagggactcaagtcacaagatggggatttcctcctcatggtttttattttgatgtttgaagtcttgatgcaacattctgagcagggtgttccagacctgctgtgcccaagggactgataaaggaaaaaattgtattcattctttgtgatttgatgcacagatgaaaaactaaacacataataacggaagttggtggttaataaatcacatcctagtctttcagagcttccgtaagcagacgacatctgcagttttctaggtcttgcagttttaacagtgcaaaaccaatgagcatatgtccagaatcagctaaaaagagcgtcagattctttttctcttagtttgtctatttttcactgtctcttcttcaaaagtgtatctgaatgattaccttccggcattctctgttattactcgttggggtgctctcgattgtccccgtgtttgagggctggttgggagagggtgcttgggaaggatgtgccactgtggggagtttgtgagtcaccgggatgcctccagggaatgtcccttccatggatgcaggaagtcctcctggacccacgcccaagatgcctggatgaatttcttgctggtctatttcccaccaaagcacagatgtgacaaagaattcctcgttcacacagtttcttaagcttcctgggatgcgacctgtgatggctcggcggagctcggtggcagctgtctccctcatctccagtgacacctgctggctgtagcaggcagtgagaggagtgcagatgagattgggggcatctttcaacggaccctgagcaaagctaaagggctgcgactcgttcacgtcgacgactgcccttcgtatcctgccttccttgagggcctgtgctaaggctctctcgtccaccaggccaccacgggctgcgttcacaaggaatgctccctgcctcatctgctttatggtaaagtcattgatgaggtggtgcttaagttcgttgagactgcagtgcaaggagatgcagtcgctctgatacagccaatcctgcagggtgtagaccctctgcatgcccagggactgctcgatcccatcctgcaagtaggggtaataaaacatgacgctgaatccaaaggctgtggctggaactgcaaaagcctgctgcgtgcgaccctagccgatgaggcccagcgtcttcccacgaatgcgggccactcccgaggccacctcgcagatctgctccatgctctgaacccgcttgccttcccacagtgcctggtacagccatgtgttcctccggtacatgttgagaatgtggcagttggtggaattggctgtctcttccacggctgcggacgggatgtttcacacagcaattccgagctcgctggcagccttgatgtccacgttgtcatagccactgcccacccccacgatcactctcaaggacttgaaatttgccagaacctccctggtgaggtgattgtgtggtgcatcatggggcccacggctctgtttagaactttctcgtggatttcctgcgtggactgcatcatagaaggccacggtggccttcaggatgggcatgtccacagtgcagtcacggccgaccaggaacgctgccagtgagcgggggcttagggggtctttcgtgatctggcggcgaattccttcacaaattctgtccaatcgctgtctcttgacttagcgcttatccacagggccattctttacggaactttgcaactctcagatcaaaaggtaaagcagtcctctaagaacttaggggaactcgcaggagtctgtgtgcatgatgccactatgaacccaatataaatttgttcacaaactctatagttcacacgatgggctgtccgtctctttaagggaatatagcttcattggttcaaaaccatttaaggtgatgaaacccatttggttgcaactcagccaccatcgcgcagtcaatcaacgaatctcaccacgaccccaggtctggagctcctggagtccgcgaccgctgggggtggaggcggcttcggcctggtgcagccaggtccttgctcctgctctgagcctcgggcgtgggttgggggtccacccgggtgtcccgcatggtgtctaagctcctcccttgccggagccctgcggactggaggagtgttcatatcattaaggagctttgataattattttgattttcaaaattatataatgcaaaaacaacaacaacaaagaataaacctacaaattttgacctttaaaagtcaacaaagatttttaaagatcaatatttgtaggtttattttatttcttcaattgggacatgttttcgtccttttctgtatgccctgcaatcttttgatgagattcagaaatttataaaacaactgtgtaatgtagtatgtacaaacttgcttactacaagataatacaacaatcagtgaggctgtacatcctggttcttcattaacagtgtcttcaatgtgtcttctctgggcttgtgtgtggatttttaaggtaaagatattttttcccattgttttccagacactgtggtcctttgcttccgcagttgattgtagtgtttgtttctctgaggctgtggtaagcatgtaacttctcttctcagcagtcataagttatcattctcattactctgccatttcctttagcattccctgtttggggagacagaatctagtcatcagcggtagcccacaaagccaaacctttgaacatatgttccactgttctcattctatactgagggatatactaaaagttggacgttttctcttgagcccaattgctgttctgggaaagaagaagggatgtggtgaatataagccagacctggttgcctcgtacagcaagcttttccaacccgccttgttttgtttttgttatggctctgttttgttttaggtttttagcagcctgcagcaatggtttttgggttctgtgtctagtgataagtggaaaagggggatgaggaaagggccttactggctcaaccagaaacagaaactaagaactcatggctgtagtctcccgtggatgcccctgtcctacagtaaaggaaatgtctttggaatgtaaaaagagagagaataataggcaacaccccaatagggaagaataaacaaataacaaagatgagaggtgcaaaggccaaggagaaaaccttaaaaatgtggtgttggaagttctgcttcaaagaaattggttctggaaaattctaaatttacttcttttgctgccacaggtggaaatttcctaccctatgcttattatgctcttaaatcttctaaggcttctctgttcatccactaacattccagggcattcacagtgacagccaaagttcacctcttctttctgctattcccatgaagctcttgtggtctgagtgcttttccattgtttttgggatctgaggaaatctgcacattttgtgagacttctatgttaagctgttttgtaaaaatctgtgcctcatgtcagaagtttgtgagagcaaaagtgcaggcattggggtttggttcacatatttcagaaacaccaaggacaaatgtttcctcctcataattttcagtcctattatttcaaatgtgttcctgcaaaaaaatcagaaaaaaaatttatcagagcccaaagcacctcagcagatatgataaagttgaatcttctatttcactttattctttttttcatctctggtaatgtaggtcaaaaagttttctttcccttagtagaaactaacttagaaatgtgaactctctatgccaaacatatcacctatggaatagtttattgtatctactcatctcaaagaatttttaaggaccttaatccatagaaaaacttagaaacatgccaggaatagaacaaattcttaactgttacattatttcttaatgagttattttattaattaatcttatataaagcttagtgggactgtgatctgtatgttttccctgtcctgtttttacgtatgtcaaattagcctataactttagcttcaggggtttcagaaaacatacttgaatttatgtgttatataaaaagtgaattggatgatatgcacatcacattaagaaaagttttagtttgtgtctaagttcactgcatagaaaaacttatcattagtgtttccatttactttcctcaacatttatctgaatgatagtataatttatttctaattgcttattatattgtagttttccacagcatattttacaatattcatgttgttcccatatgtaaaaatgtaaggcttttctttgttttaaaaataataaattataggccagtgctgtgtttcatgcttgtaatcacagcacattaaaaggtcgagataggtggatcatgaggtcaggagttcaagaccagcctggccaacatggtgaaatcctgtctctactaaaactacaaaaaatatcgccggcgaggagcggtgactcaagcctgtaatcccagtactttgggaggccgagacgggtggatcacgaggtcagaagatcaagaccttcctggctaacacggtgaaaccccgtgtatactaaaaatacacaaaaattagccgggcgtgatggtgggcgcctgtagtcccagctactcaggaggctgaggcaggagaatggcgtgaaccagggaggtggaggttgcagtgagccgaggtctcgccactacactccagcttgggtgacaaagcgagactccatctcaaaaaattaaaaaaaataaataaattatagcctttccatttgtataaaaagaggagtaatatattaagaacataataaaaagtgtctctaatatcattgaaatctttattaaaattttcttctaaatgctctttatgggagattataatgtatttgttgtgcaattttgttactctaaccatatgctaagaattcaaaatctgctctttatgggagcccagttatggttgaacatgctagttatctggaaagagtcttcttccgttgcatgctttgtttattcggtatttcacaggctaatgtttatttaattttattttctaatattatatattcttgtatttccttgttaggataggctgccttacattatttaattgtgtttttagattctgcctatatattataattttgtatgactatattcaactgtgtacagttgaatatgaatcagtcaaatatgaatcaaccacacgtctattgccaacataattctctgttcatttgcttgtataaacattactcatactttatttatgacttgtgtatttgtttaattagttggtggtcaattatttttttaatcctctctgggtgagtagttgtggaaattgtcttaatttccacttctatatattaatgaatctatattacttttgtgttgaaggaaacacttctgtgatttgaagttaatttttttttacctctgaactttttactggcctcctgctccccaaagggaccttgcttctgatggcttagcacaacaaaaagtctgtattgttggtctcagacaccactttcccgtccactatcctgcgggggctgttcttttggatagcttgcaggtatttactgctgtccagagcatccaggagattgaaatcctccccgtcttctagcaggcggcagtaagtggcaatctcagcctccagctcgaccttgatgttccacaggtcctcgtgctcttgggcgtggtacctctcttcccggttttgggatagctctgactccaggtgcagcaggatcctgttgagctgctccatctgcgtctacctcccttaggctgttctccaagctgactttcagatatctcattgagtccagttcgatatccaaggactggactgtacatctcaaccccctgagcatcctctcagcagctccgatctcagcggactgcatggtgactactctggtgctctcctcagtctgctgggaccagtacttgtccagctcctctcagctgttctcagccatctcgtcatattgggcccagatgcctgtcatgatcttgccaaggtcctgagacttggggacatctacctccatggtcaaccaagagctggaaatcaggtattatagacctttaacttcctcctcatgattcttcatgaagagcagctcttccttgagggcctccatctctgtctccagcagaggctgactgacactggtgttatcagtaatgtcgcactccacaaactggcacatggccaggtctgtctcacactttaaagtcatcagcagcaaaatgatcattgtcagtctgcaggatgatgcaggcactgtctgcagcagtggcaaagatttttttattagtctaattgtctgtctttatgctagtaacataagattttgattactgtagatttctaacatgtcttgaaatcaggaattgtaatgcttccaactttttttatgtggtcccctgaaattccgtatactttggggagtcacattctctgtttctgtcaaaaataatattaagaatttcatagggattgtattaaatctgcagctcactttgggcattatagacacgttcaaaatattaaatttttaactcttgaacaaaaacatgttgaagaataaattgtttaattatcatgtatttgtgaattttatgaattttcttcggttattgatttctagttttaatccattttggtcagaaattatagtctgtagccttcagtttttattatactttaagttctaggatacatgtgcagaacgtacaggtttgttatacaggtatacatgtgttatgttggtttgctgcacccatcaactcaacatttacattaagtgttctcctaatgctatccctttcatagccccccacccccaaacaggcactagcgtttgatgttccctgtcctgtgtccacatgttctcattgtttaactcctacctatgagtgaaaacatgcagtgtttgtttttctgtccttgtgatagtttgctgagaatgatggtttccagcttcatccatgtccctgcaaatgacatgaactcatccttttttaaggctgcgtagtattccatggggtatatgtgtcacaatttcttaatccagtctatcattgatggacatttgggttggttccaagactttgctattctgaacagtgccacaataaacatacgtgtgcatgtgtttttatagtagcatgattcataatcctttggatatatacccagtaatgggattgctgggtcaaatggtatttctggttgtagatacttgaggaattaccacactgtcttccacagtgtttgaactaatttacactccaacccacagtgtaaaagcgtttttgtttttccacgtcctctccagcatctgttgtttcctgacattttaatgatccccattctaactagcgtaagatggtatctcattgtggttttcatttgcatttctctgatgaccagtgatgatgagcaatttttcatgtctgttggttacataaatgtcttcttttgagaagtgtctgttcatatcctttgcccactttttgatgggattgctcgtttttttcttgtaaatttgtttaaattctttgtagattctggatgtgagtcctttgtcagatgggtagattgcaaaaattttctcccattctgtaggttgcctgttcactctaatgatagtttcgtttgctgtgtagaagcttttaagtttaattagatttcatttgtctattttggcttttgttgccattgtttttggtgttttagtcatgaagtctttgcccatgcctatgtcctgaatggtattgcccaggttttctcttaggtttttatggttttgggtcttacatttaagtctttaatccatcttgagtcaatttatgtatagggtgtaaggaagaaatccagtttcagttttctgcatatggctcgccatttttcccagcaacatttattaaataagaaatcctttccccattgtttgtttttgtcacatttgtcgaagatccaatggttgtagatgtgtgatggtatttctgaggcctctgtttttttccattgctctatatatctgttttggtaccagtaccatgctgtttttgttactgtagacctgtagtatagattgaagtcaggtagtgtgatacctgcagcttttctctttttgtgtaggattttcttgcctatgcaggctgttttttggttccatgtgaacttcaaagtagttttttccaattctgtgaagaaagtcagtggtagcttgatggggatagcattgaatctgtaagttatcttgggcagcatggtcattttcatgatattgattcttcctttccaggagcatggaatgttcttccatttgtttgtgtccgcttttatttcatggagcagtggtttgtagttctccttgaaaatgtccttcacatcccttgtaagttggattcctaggtattttattctctttgtagcaattgttgagtgggagttcactcataatttggctctctgttcatctgttattggtgtatggaaatacttgtgatttttgcacattattttgtatcctgagactttgctgaagttgcttatcagatttaaggagattttgggctgagacaatggggttttctaaatatacaatcatgtcatctgcaaacagagacaatttggcttcctctttttcctaatcgaatgtcctttatttctttctcttgcctgatggccctggccagaacttccaatactatgttgagtgggagtggtgagagagggcatcgttgtcttgtgctggttttcaaagggaatgcttccaggttttgcccattctgcatgatattggctgtgggtttgtcataaatagctcttattattttcagatgtgttccatcaatacctagtttatttagagtttttatcatgaaaggctgttgagttttgttgaaggccttttctgcatctattgagatagtcatgagatttttgtcattggttctgtttatgtgatgaattatgtttattgatttgcatatgttgaaccaggcttgcatcccagggatgaagctgaattgatcgtggtgggtaagcttttggatgtgctgctggatttggtttgtcagcattttattgaggatgtttgcattgatgttcatcagggatattgtttttttgttgtgcttctgccaggctttggtatcaggatgatgctgacctcataaaatgagttaaggaagattccctctttttctcttgattcgaatagtttcagaagggatggtagcagctcctctttgtacctctggtagaattccgttgtgaattcgtctggtcatggactttttttggttcataagctattaattattgcctcaatttcagaacctgctattggtctactcagagattcaacttcttcctcgtttagtcttggaggtgtggatgtttccaggaatttatcaatttcttctaggttttccactttatttccgtagaggtgtttatagtattctctgatggtagtttgtatttctgtgggtttcgtggtgatatcccctttgtcgttttttattgcgtctctttgattcttctctcttttctcctttatttgtcttactagtggtctatctattttgttaatcttttcaaaaaaccggctcctgggttgattgattttttgaagtgttttctgtaacattcaattttttttaattctgttaaaaaatttttttccttatatttatttttaggacaatgttttatgagcttttgacaagactgtgagttttgttgttgtgtagagtgatctctatgcatctgttacatctaactgttttacagtattttcatgtcctctgttttcttcttaacattctctctggctttattattaattacagaactggtgtattaaaatattgttctcagtatattgcagttttttgtttatgttctgacaaaatattattgatttattttaaaatcttcatgtgaggttcatatatatgtgtgtctgtatacataattagataaatacacacaattatataaatgtatattatataaatgtatataattttcctaggtttccagtgaataaacttttttattattttgtcctttgttttctttgacagttttaacttataatttattttataaactaagacagttatttaaaaagtattttgcataatgtgctcgtgacgttgtcttcatttcattacgatttgcataaaattgttttgatgcatcttgccacttttagtctgtttttgttactatatagtaagatggctcatatctgtcatccgagcattttaggagattgaggtgggaggttaacttgagcccagaagtttgagaccagcctgggaaacaaagcaataccatgtctctaaaataaataaataaataaataaattgaatcccctgtagacagatgtagttagattttattttattttttatctctgtactctatttatgacttttgtttgagaagtttagtttgtgagtagctacataatttcctgcatttgaaggaattacttttgacactttttggagtaaaaggtaaatattaaatttgaactaaattggacatggactcaaacaatggtcaccaagtcccggaacaggttgtgtgagccccttgaagccctcatccagcgctgtttcagataaatctctatttcaatttattcctatatcttagttattgaaaaacaatagacaatcaaaaaaacaagttgacctttttgtgttccttgagccccgttgtgaatagccttcctgaccggacttcatgccaaataactcattacaaaaagagctggggttccagactgcgccaaagcttcatgagatctcacgttgtctgtggacggatgagtggccaatctggagcccaggctgttgcttcacagtcttgtggtgaatcctccatagtttggtgagtttaaatatatatatatatcttttcccttctccccgtcccattgcaacttgcttatatatttgcttattatatctgcattgccatttaagtgggataaagtttgtttgaatcactggctgtgcgtgaggtgcagcagggagtcccagttggtaattgtaatgctgagggaatttcccagcattgatgatgcttgcttacttcttataagttaaagtgtcaatgtagggactggttgttacaagagaaatgtaagctggaaaaggaaaattttaatctgacttccagactgaccctggtaccatgccaggcctgtcttgactgatcaggctcaaagctatcagcctattgctgaaaaagcagctgtccgagttgcccagtcagggtaaaactgaataactagtcagttttcagggcagaagagggtaaaaacccaaatcctatctcaaggatgggaagttaactctaataaaattcaatggcctgcacaaagtgtaaagttccttggcatcctatggactgcagggaaacagtccattttaccaaaggctaacgctaaaatactagaatttgcagccctaccactgaaaaggaggtccaaaattgtattggcttgtttggattctggagacatcatattccccacttgggtaacatattacaacctctgcatgcagtcactagaaaacactatgaatatcactggagagagaaagacagcctggcttttcaacaagcaaaacaagctgagcaactggccctggatctatggcccttataggatgagtcaacagaactgcaagtaactgtcctacatcaacatgctaattggagccttaggtagaaacaagatgggaagaagatacctttggagttttagacccagaagctgccagaggctggcaaagcttatactctttgagaagcagctgttggccttctactgcgcttgaaggaagcagaacacctttgttttaatcatgatgtttttatgaggccccaaattcctattatgacttgggtcatgagctccctcaaaacccattggatagggtacactcaagaatgtagtatcataaaatggaaatggtacatacaagaccaggataagccagaactaaaagcggtatcatttttacttgaagatgtgcaaaacttgccaactcaggaaaccacagggcaagtcctgcatatagggaaggaaacctcccctgcccaatggggcaaatcctttaaagaactaagcccagaggatcagaaacacgcttggttactgatagttccaccaaatacattgatgggacctgatgctgggaggccgtggcttataatcctgttaaaaacataagcgtttctgatgaagggaggggtgtgagcagccagctggctgaactagaagccatcctccgaactattcaggaggaggccagagcaatttgttgcttgtataccgactgttggtcagcagaaaatggtcttactacctagttgcccgaatggcaatgaaacaaatagtgaataatgaataaagaggtttggagaaaacaatactaggaagatacctgaatcctgatgcacattactattattgctgtttttcatattgattctcatgcatctctgcattctcttgacagactaaacagcaggtagatcaacaggccaaaatttccagcataaatgcaaacttgaatgtgggtgaatggattacaacacattcaagcctggcgatgagacacattataatgtatggtggtataattgataatgattaccaggaacagttaaagttcactttacacaataccactccacattcttttgttacaagaccgcagattcgggttgctcaattgtcagtggtacctggtaccttgttaacaattaacccctgaggaaatctctgccccaacagaggctacgtacagaactgggaaattaagatccactggtataggtagcttaaatcctggaacgaaaatatggatacagcctccatcagatcccgcccctaaggctgtgaccttgtaggtatgggagcagaaaataaaagggtagtacagtttcctaaaaatgaaaaacaatattatgttccccttcagttttgttgttacagagaataacctgtctactagtaatcagtacctgggtcatcaggtctgaggtggagagtgaattcatcaactgggcagcaaccactgcgacagaagctaaccgcagtcaatgctggctatgcatcaaattgccagaggccacaggaaatggactgccttgcagagttgtccttgccaatatttctgaatggctctgtcactacaaatggggccaaaacaacaacacttgcaatccaacctggacttcctttgctactttaataacatcttaatacactataattgtagtataaccattgctgtcccctggggggccctctgggtatgcagaccctatgggtggcctatctgcccccttattggatggggagattcacttgggggtgccattaattccattcaccatccgggataatattcccttccccaataatctagatgcttacaaaggtagctggttatgaacgtgccagactccctggtggtggaaaactatcacagtattctcccttgcccctcgtacaatcctgcttcagcaacaaattaaaatattaagtccacatatagtaaaagctcctaagatagtagcactggacttctgttgttatcagaagaacttgttcagctgtgtactgttgtgttgcaaaatcgaatggcattaggtatgtttaccgcagcccaaggaggggtttgagtcttgctgcattctgaatgttgtgtgtatccctgacagttctcgcagtattactctccttgccgaagacatgcaaggacaagtaaaacagttagaatctaaccatcaggaccccatcatggactggctgtcaaactagcattggcgttggccgtggtgggtgtggtttctattaattgtgcttttaattctcctctgctctatctgtaatctataccagttgtgacttccccgtataactgtaaaaatattttcctatgattcagtgtcaaattgaggctgaatgaggaggaaaagttaaatattaaatttgaactcaatgaacatggacagaaacaatggtcactaagtcctggaacaggttgtgtgaaccccttgtggaattcatccagcactgtttctgagaaatagttattgaaaaacaacagaaaatcgcaaaaacaagtaggccttttcgttttccttgagtccagtcacgaagggcccttgtgagtgggcctcatgccgaacaaatcgttacaaaaaaagctatggtcccagactgtgctgaagcttaatgagacctctccttgtctgtgcaggggtgggtggctgactctggagtccaggctgacgctttcctataggcaaagctcagggaacagaggagagtcacatcaaatagttgatgagtcaagagatatgtcacagggactcctgtatgcagggtccagacaggaaatccacatcgttttggtgctgagcccagcaatatattacaatgtcttctgagggaagaaccaaggcaaaaaattaatgtcactttggtgttaagcccagtgatacatcacaatttccactgcaggaagaacctaggcagaagagaatagttacatcagctagatggtgccaccattgatatgtcacaatctccacttgaacaggaatcagtcagcagaagcaagtcacatcacctgagtgatgggtgcagagataagtcacaatgtcccctgtaggcagagcacagaaaggagagctgcataacctgggtgttggacccagcaatatagcttatatggtagacccctggcagaaaaattacaaaacatgggtgcagcaccaagtatatgttataatgtcccctgtgagcagcaccaaggcaggacaggagactcgcatcacttggttgctaagacaagtgatctgctacaatcttctttgtaggcagggtgcacacactttttttaggtggtgaatgcagagagatgtcccaaggccccctgtgaacagggctcaggcagtagccatcaattccctaggtattatgcccagcagtatgtcacaatatacaaaatatgcagggcccagggaaaagaggagagtcacatcatgtgggtgcttgtcccagtgatttgttacaatctctctttttgacaggacccaggcagaagaggggggtcataggtgctgggttcaataatgtcacaattttatcatgggctgggctacgcagaagagtcaagtcactcacgagctgggccgagatatatttcacagttatacctccaggaaagtccagggctgagactgacaatcctgcacatgtcccatatctaggtgtgagagcaaacacattgtgtttgttgggtctaagtgtagaagtcacagtctcaatggtgcactggatctgtgcatggcagcttcagtctttcccgaggaccgtggccccttaatggagtcacagcctcacgtgtttgctgaatgttggttttagagtcactgactcaaacatggatcgcatccacttatgagagtcaattattcatctctcaaccgcctccaggtgtgagatttggaacctcaacaatgggctgtgttcatgtgaaaagatgacaatttttactcttggctcagcgtagatatgagtgtcacaatctacttttgttctgggccctgtcaggacactctcttcaccatatgcagcctttatagagtatgcatgagtgtaacaattctctctgaaaccttaagcaggcacggacccctccttgtacctttagctttaagccctggtatgacagtcaacatctttctacttggatgggtccaaataagagttcttaactgcctatgagctgcgtttaaaaatgagtcaccatcccacctgtggctggatgttcacatatgaaagtcacaatcccagttgtggactgtgtctgcatgtgtaattcaggacctcaagagtgggctctctccacgtgtgatagagaccatcctgaatattggtgtggtgtgcatctgagaagtataatctcaccagtgtggcgagccctgtggtgacaatttctctaccatagtttacacaatatgcaagacagtggtactcctccgtgtgacgtatcactgggccttgcacacaggtaatgtgagtctcctctcctgccttggaacgctcacaggaggcattgggtcataccactgaagctgatattcaggttatgtgcctgtctttcctgtgctctgtccatgggcttttgtgacatatttctgggtccaaaacacaggtgacataactctcctgtctgaactctgcctagagagggcatggtggcatatctctgcaccagccactagatgatgtgactctatcttctgtctagtctctgcctacagggtgaattgtgacttatcacccggcgcagcatttagctaatgtgactcttcccttttttcaggttctgccctcgggggagattgtgacatatcgatttgtaaaacaccaaaatgattttactcttttatcttggctctgccctcagaaggctttgggatatattgctgaacaagcaccaaggtaatgtgattgtcctacctgaaccctgcccacagggagcattgtgacatatctctgagcccatgaactatttgatatggctctattctcttacctgggctttcgccatgagaaagattgtgaagtatttcttggtccagtgcttaggtaatgtgattctcctctccagcctgagacatgcccacagaagtaagagtgacatctctgggcctagcccacaggtgatgtgaaccttatcccttgtttctgcccaggggagtcattgtgatgtatctctgagaccattattagaatgatgtgactctcctgttcttactgcgacctgtccacagtggggatgatgatgtatcacttaggccagcacatatgtggtgtgactctcttttcatgcctgtgccctgccccctgggttaattgtgacatataactgggcccctcccataggttatgcaacatatccctgtgataacactctttgtaccatttaagagctttatataatatgagagagttgtattcctctaagaccttcatacaaaacgaagagttaagacctaccggttttccaaagcctccctatgaaaaacagtatttctcttagtggcaggtttgaggtatgagagtcattattacacctgtgagctggccaagatatatgtttcaatctcttctgtgggaagggagtgagcaggagagtcacgtcaccgggatgcttggcctgagatctgtcaatatcttccctgatggcagggaacaggtaggagagtcacatacctaaggctgggccagggatatgtaacaatgttttctgaggtcagaggctaggaggggagtcccatcacttgtgtgctcacaggggatatgttacaatcccctcctgaaatcagagtacaagcagcagagtcaaatcacctgaatattgagctcagtgatatgtcaccacactccctgtgggcaaggccatagcaggagagaaacatcacctgattactgattactgggcccagtgatatgtcagaatctttcctgtgggcaaggtgcaggcagaaaggagagtcacatcatctggtgttggaagcagaaatatgctacaaggctcactgtggacagagttcaggcaggagcctctaatctcctaggtgttaagttcagtgatacgttacaatgctccctgtgggcagcacgaagtcaagagaatagagccacatcacctatgttctaggtccaatgatatgtcccaattttatttgtgagctgggcttaaacagaagagtctaatcactcaggtgctggacaaatgtgtatgcttgtcacaatgacacctgcaggaaagtccagatatgggatgaatcccgcacatattctggttttatgcatgagagtgaacaccttctgtatgtttgatctaagtacacaagtcactatctcaatagtggactaaatttgtgcatggcagccccattttctcttgcgtactttgtcccctaattgaaatcacagcttcctaggtgtgctgactcatgatctgagagtcatcaacacatctgtgactctcaaatatgagagtcaatttttcaacttttcaatctgcctttgggtatgggattcagagcctcaaaagtgaactatgatcatgtgaaagaacgacaatctttaatgttggctgggtgtgcatcccaatgtcattatattactgtgtgctgagccctattaggactttctgtgttgcacctgacggctttatgttgtatgcatgacagtctcaattctttcagagattttcatgctggtatggacccatgatcaaacctgtggccctaagcctatatatgagtcaacatctttacaattggcggggtccagataagagagtcatcagctttctatgcgctgggtttataacgaagttcccattccaactctggccagatctttacatatgagattcgcaattccaactataaactgcattcatgtgtgaaattcaggacctcaccagtgggttctgtttatatgtgagggtgaaaatcataatggtcaggagggttcagggtgcgcataggagtaacaaatttcacctgtgtgctgggccctgtgataagactctctaccacctgaggactttctgtaatatatgagagagtggatgatcttagcgaggagacccagggttttttttcatttccctaagtgtagctaggagaagcagtatctcttctattggctggtttgacatatgaatgtcatcattgcacctgtgtgttgtgttccaagatatatgtaacaattacacctgcatataggaagagagcaggagagtaaaatcagttggatgctgggtcagtgatatgtcgcttccctgaggacagggaccagtcaacagtcacattacctgaatgttcaggcattggtatgttgcaatccactcctcacattaggaacgaggcagcagagacacatcacctgcatgctggatctagcaatatttcacaatcctctctgtggtcaggatgcaggcagaagagtcacatcttcttggtgatgaatgcagaaatatgtcacaagcttcactgcacgtaaggtagaggaataaacctcttattccctaagtgttgggcccagggatatgtcacaatacccaaaatatgcaaacccaggcaaaagagaacagtcacattaccttggtgttagggtcagtgatatgtcacaatcccctcttttggaagggcccaggtaagagtggagagtcacatcgcctaggcaatgaatagaagagtatgtcataatacccctgttggcaagacctatgcagaagagtcacatcacctatgtgttcaacccagatatatgttactgtacaccatgtatgcagggcccaggcaagagaaaaggccacatcacctcggttctgggcccagcaatatatcacaattccccctaagaggaggtaacagacagcagagtcacatcacctaagactgaggagcagagctatatggtagttccctgtgtgtgtgggcccaaaaatagaggagagttacatcacctgaagactgtacccagctataagtcttaatcacccctgtggccagcacccaagcatgagaagagagtaccatcatgtaggtgctgtgccaggctgtatttcacaatctccactatggataggtttcagggggaagaggagcattacattatctagttgatgagtctagagatatgtcaaaatgacccctctggagacaccaggatgcagaatcacatgacctgtgtgctgggtctaggaataacccactctcccttctgtaaacatggccatggcagaagatgagggtcacatatttaaggtgatgaacacggaaagatttcacaaggctccccataggcaagacccaggcaggactttcccttccctcagttgttgggaggagaaatacatcacaatgtggggctcaagcagaaaacaaaagaaatatcccctattttcagggctcagaattatgtcacaatctctcctatgggcaaagcctttgttaaaaaaggagaatcttgtcaaatagttgatgggctcagagatatgtcccaatgccatatgttacaaattgctgtaggcaggcttcaggcaggagactcaccttggtgttgggcccaataatgtgtcacagtgctttctgcttgcagagcacagtcaacagagtaatgtcactgagaagttggacccaccaatgtatcacaatctccttccaaacaaatcctaaaaaacaaaagaagagtaacatgagataggtgctgggcacagtgatatgtcacaatcctttctttaagcagggactaggcaggagaagaaaatcacgccacatgggtgatgggctcatagatatttcacaatgtccccttaggcaaagctcaggaaggagaggtaaatcatctaggttttggatgcaacaatatgtcaaaatggccattgtggactgggcacaggcagaagagtcacataacatggatgtgggacccagcaatacatcacaacacccctgtgagtagcactaatgcaaggcagaaaacatacattacctaggtgcaaggccaagtgatatgtcccaatgtcccctgtgggcagcaccaaggcaggagataagagtcacatcatttaggtgctggcttcagtgatatatcagaatcccatctgtgagctggacacaggaaacagagctaaaacactcaggagctgggcagagatgtatgtcacaatcccacctgcagaaagcgacagggatgagatgaacaactccacacatgtccggattccaggtatgagaatttgtatgtttggcctaggtacaacagtcccaatctcaacagtgaactggattcataaatgagtcttctctggctgagaagaacttctccccttaggagagttacagtctcacagatgtaatgaattttggtttgagagtcacccacctacctgtggacaagatccatatatgagagtcaattttctctttctttctttctttctttctttctttctttctttctttctttctttctttctttcttttttctttctttcttctttctttctttctttttctttctttcttccttccttccttctttctctttctttcttctttcattctttcttttcctttctttctttctctttctttctttctttcttttccttccttccttccttccttccttccttccttcctttctttctttctttctctctctctttctttctttctttctttctttctttctttctttctttctttctttctttctttctttcttctttcggtcccttgagacggagtctcactctatcgccaggctggagtgcagtggggcgatctcggctctctgaaacctctgcctcctgggttcaagcaactctcttgcctcagcttcccgagtagctgggattgcaggtatgtgccatgacgctcagctaatttttgtatttttagtagagatggggtggacaggcacagtgtcccatgcctgtaatcccagcactttgggaggtcgagttgggtggatcacctgaggtcaggagtttgagaccagcctaatcaatatggtgaaaccccgtctccactaaaaacacaaaaattagctgggaatggtggcatgagcctgtactccctgctactcgggaagctgaaacaagagaattgtttgaacccgggaggcggatgttgcagtaagcctagatggtgccactgcactccagtctgggtgacagagcaagactctgtctcaaaataataatcataatcataatcataatcataatcataatcataatcataaatagtagagagacgtggtttcaccatgttggccaggatggtcttgatctcctgatctcatgatctgtccgcctcggcttcccaaagtgctgcgattacaggtgtgagccactgagccacgccggttgtgcccatttttgaggatggcaacttttattgtcaccagagtgtgcatgagtgttagaatctcacctgtttgctgggccctgttaggacactatgtacctcctgtgggccttgtagagtatgcattaaacataatccactctgaggtcttcatgctgatatgaacctatgatcatacctgtggccataagtccaggtatgagagtcaacatctctccagctggctggatccagataagaggatctttacttggctgtaaactgggttcagaaataagtcactatccccactgtgactggatgttcacaaatgatagttacaattccaactgtggacggcattcaggtatgaggtttagacctccctaatcacctctgttcctgtgtaggaatgagaattctgatgattggtgggtgtgcacacagagaacacaatctcacctgtgttctgggccctgtgatgacactgtaccatctgagtgctttacaggatatgcaagagtgcttactttctctgaccttcatagtaagagaagacccataattttgcaagttttgttaagcctggctgtgagagaaagtatctctgctattggttggtttaaggtatgaatgtcatcgtcacacctacatgctaagccaaaatatatgtgacaatctcacatttgggtagtcagaagcaggacagtctcatcacctgggtctgtgtcagggacatgttgcagtcttccctgaggacagggacaaggcaagagagtcacatccctaagagttctgccagggatatgttcttgttccctcctgaaagcacgacacatgcagcagagtcacctcacctgggttctgggcccagtgatatgtcacaattttccctgtgaactaagcacaggcaggtgaaacacatcacctgtttgctgggcccagaaatatgctacaatttttcttgtgagcagggttcaggcagaaatggggggggatcatattttctaggtgataaatgcagagctatgtcacaaggccctcagtagtcagggtcttggtagaagcttcctattgactaggtgattcgcacagtgatacatcacaatagctaaattatgtggggcccaaggcaaagaggagagttgcatcacctaagtgatgaacaaaaaatacttcatagtacccatggggaaatggcccatgcaggtgagtcaccttacctacgtgttggacccagtgatatgtcacaatacacaataaatgtagggcgcagccaagagcggacagtcaaatagctcaggtgctgggcccggtgatacattgtaatctctctttggtcagagccctacagtagaagaaactcagttcacctcggtgctgaggtcagccatatgtcacaatacccctgagaaatgagcccaggcaaagagtcactacatttaggtgagaggcccacagatattttgcaatggctcctgtgggtagcactctgtaaaaagacagtcacattacctagagtctgcccgcaacgatttgtaacaatccctgctataaacaggtagcagtcaggagaagtgagtgccatcacctgggtggtcagtgtagagatatgtcacaatgccccctgtaggcaaagtctagacaagagttacatcacctgggtgttggacccagcaatatgtcacaatggctcatgtgggcaaagcacaggacagagtcacataacaaagtgccaggaccagtgttaggtcaggatacccattatgggcagtgccaagacaggagaatagaagcatattaattagatgctggattcaaggatatatcacaatctcatctgtgggctacacccaggcaaaaatgtcaaatcactcaggagctggctagaggtgtacgtcagaatcacacctgcaggaaggtccatggatgagattaacaatcccacataagttccggttctgggtatgagagtgaacgcctcctgtatgttgcatctatgtgcataagtcacaatctcaatggaggaatgggttttttccatgagagccttaatcccttttgaaaacggagttatcttagtggattcacagcctcacaagtgttttggatcttggtcagggagtcacaaacccacttaaggacaacatccacttttaagagccaattttccaacttttgactgcctctgggtgtgagtttcagaacctcaattatggtccatgttcgtgtgggagaatgacaattttgacagatggctgggctcaggcaggagcctttcatcctgcaggtgttgagacaaaggatatgatacaacacctaaaatatgctgggtgcaggcaaaagaggagactcatattagctggttgctaggtccagttatatgtcaccacctccctttttggcagggctaaggaaaaagaggagagtcagagctaaagaaatgtcataatgtccctgtgggtagggtctatgcataagagttgcatcacctagtcattgaacccagccatatattagaatacataatgtatacaaggcccaggcaagaaaggagagaatatcacataggtactgtgtccagcaatatgtcaccataccccccagaggggaggctccaggcaacagggcaacattacctaagtgaagtgcccagagagatgtttcaatgcccctggtgggtaggattttgaaaaacgagaagttacagaacctaggggctaggcctagctatgtgtcacattcatctccaagacagagcccagacatgagagaaaagtcacatgatgaagggcatgtaatatgtcacaatccttatgtgagcaggccctaggaagaagtagagagtcacatagtctagatgatgggcccagagacatttgacaatgactcctgtaggtagggaccaggcagaagaatcacatcacccctgtgctgtgcccagttataagtcacacttccttctgtgggcatgccccaggcagggagaattcacatcatcccagtgctagacccagggatatgtcacaatctctcttatgggcaatgctctggtaagagaggagagttgcatcaaataggtgatgcacccagaagtatgtcacgatgccttctgtgaactcgatccaggcagaagattcacatcaacatcaacttggtgctaagcccagcaacgtgtcacaatcccttctgtgtaaagggaccaggcaggagaagagaatcacatcacctggctgatgagcacagagatatgtcacaatgcccctgtaaggcagggcccaggctgttgggttacatagcctgagtagtggacccagcaatattaacacagtgtcccatatgggcagtgcacaagccggagagtcacataacctggatgcgaggccaagctatatataacaacgcttcctgagggcagcgccaaggcagaagaggagactcacatcacctgggtgtaaggtctagcgatatgtcaaactgctcactgtgggcagtgccaaggaaggagaatagagttacatcctcaatgtgctggatccagcaatatgttaatatcccatctgtgggctgggtccatgcgagcccgtcaagtcacttaggtgctaggcactgggaaatttcacaatggaagctgcagaatggtccaggaattagattaacaatcccacagctgtctcagtggtaggcatgacattcaacacctcctgtatgttgggtctaagcccaagagtaaccatctcaacaccagactggatttgcgcatgacagcctcaattcctctgcagactgacctgtgttcccgtgagaggatgacaatagttactgttggctgggtgtgcatatgagtgtgacaatctcacctgtgtgctcggcccagttagcacgctctgtgtactacccaatggccctatacagtatgcatgagagtcgtaatcaactttgagaccttcctaatggtagggacccatgatcatacttgtagcattaggcccagggatgagagtcaacatcattacaattaactatgtcaggataggagactcatcccttgcctatgagctgagtttagatgtgggccaccattttaactctggttgaatgtttatatatgaacacaggcctagcaccaatgtgatgtgagtctttggcctagacacttcaagcaggaggcaatgtgacatatctctgggtctatcaactatttgatatgaccttccttttttacctgagctttccccataaaagagatgtgacatatgtctagacccagcacctgggtgatgtggctcttctttattgactgagccctgtgtattttgggtattctgacatatccctgtacctaacttctggaagataagaagatccaacatgggccctgcctaaaaagtctcttgtgacaaatttctacatgaatcaccttggatatttgactcttctctcttacctgagctttgcccataagagagattgttacgtacctctgcagcaagcacctaaatgccgtgactcttctttcttgcctgggtcatgcccacagatgaaaggtggcttatcgctgtgtccagcacaccggttatgtgattatgctgcctgatctcttctcacaggagctgttgtgacaaatccctgggcccagaaattatttaatacgactctcctcaatgaccttaactttgtgcatgggataaattgtgacatacctctggatccagcaccgaggtgatgcgactctccttttctgcatgggctatgcttacaagaaggaggctgacttattgctgtgttgacaactgatgtgatacctctgttcttgtcttcctagattttaagaatttaaacaagagacacaaagaaaaaaagtacagcataatttattggaaaagaaaatatttgaaagttaagtgcagaatacagtacaccctgagagagatactccagggctgactgctcataagagtgagacagcgtggactgtcgctggagaaacccctttatggcagttttacattattattaataaggaggagggaagaggagttgctagtaaacatgttctctgtggtattctgggtgcatatgcgcagtagctgtacatgcttgttcatatgttgcatgtctcgttagcatcttatatttccacccaggagtgtatttctgtgtgtttgtttgtttgtttgtttgagacagagtctcgccgtgttgcccaagctggggtgcagtggtgtgatctctgctcactgcaacctctgcctcctgagttcaagccatgctcgtgcctctgcctcctgagtatctgggattacaggcatgcaccatcataccctgctaatttttgtatttttaatttagacggggtttctctatgttggccagtttagtctcgagcttctagtttgaagtgatccatcttcctcagcctcccaaagtgctgagagtagaggtataagccaccgtgcctggctagggggtgcattgtttgctattaaaataagcaaaatttaagtttgagggcaggtgaaatcaaaatacacatgctctctagaacagaaagtccttaatgaggatagctttgctcgaataagcccaattacaatgcgaatgctacggcttattgtgttggctgtacagtcaccatggtttctgtatcctgagatcatggtcattttctgtactatctattctgcctcaatttccccctaagagattttagggcaataaccatattggaggttgaggggttagaccactttttctggagctgtttcctgctgagtgggtgttacttctgcctagcctgggccttaaagtttcttcctgtgtgatctaacagggtgtaaaccatgtcattcgtggaaccagtgggaagatgttggcagccaaagattgaaagccttgcaaaccatcatgcaaacatggagctgccacaagcaacatagcaggaaatcagttaacattttaaacaaaattggaacaaaagtagaagttgaaaatataataatgacgggtactattaaagagagcaaggcaggcaatggacattgctttcatgttcccatggaagttcctagagattcaattttgtctgcctgggtgatgatattattaatattttcttggaataaaccagaatgattgatctcaaaaaacagcattcttcttttagatataaacatgttcctctttgcttggctgggagaagatcccaggctctttgattttgttggaatgcagtggccatggagtccagatgttgttgaagtctattgaggccctctgctgcctgttggggacacactgagattttctgagatagtttatactggattcccaaggctccaccttatggtgacatttgtgctgcaaaagtattctgctttaaaatggtgaaagcagcaaaagttttaagtcttttctatttttcgcaaataagaaaaagttttgtgcagctgagttggcagcagtcattgggtccatttatggatggtaaagttgaatggtggtcaaagttagagactggaaggcttcagtaaacgcgctgaagttgtctgagagccatcagagctgttgcttacattggattagatcatttactgggaagagaagaagcactctgatggtcctctctccatttgagactttctgtaagcggatcaaattctctggccctgcatggtgtgaagctccactgtgagtaactgcagctggactggtctctattgtaactggcaaaggctgatagaggagcataaggaggaggtgaaacaagcttagattctacagaagactctgatagtgtggggacgctggggattctaaagcaggtgtaggcctctgagggcccctatctggagctggtattaggctgtggggtctggggtcacttgtccataaaacaaatgatcttctactggatctgaggggctttgtggcttactaggctttagcccacaggtgctgcatggagctgggttttgttgtcgggccagaaagtcttgcacataggatacttcagaccattttccctgattactacagaaaagatctagctgtatgatggtgttaaatttcacagtctcattctccagccatgttttgtcagctaatctgtatgcaggctaaatagttttacaaaagaagataattgtttttttgcttcatttagccaaaagctgtttcaatttttaaatatacatcccaggtgtgtttcagtgacagtagaggaagtgattcccatggtgccgagagaatcctgcaaacgacagaacatgtactaaagtccaggaggctgtgggcagccccatgagccaagtggaaccaccaagttgtccaactcatccccttgaaaccccattaactgaagctctaggaggtcataggcatttgccatgcaccgtcctagctctcaccagcgctggacatctccagccctgccgagatgacccccactgctcgctggggggcagatgtctggctgacaagcctttccctaattcagtggtttgccatttatgatgcccaattataacacctgcaatgctcagattcaatccctatgactgggcctatccatgactgtgcatcttttgttcagcaaagaaagcctgttgaagaacaatttcaaggagctgggaaatgcataaagcctaaagggacagggtttccccagaactttagtgaaacagtgctggaagaaccagcgatagttaaccaggtagtctggaagtgccacagtattcacggcaagtaaagggaaagtgaaatcagtgaagcggacagacctctctccaggccatggcaaaagaaatgttgatggctgatgtaataccttgattcttattttcttagtttaaaagaattcaaacaagaaacacacagcaaaagaagtacagcatagagtaatttattgcacacaaaaaaagaaaagactactttgaaaattaagtgcagaatagacggtacattctgagaaagagattccagggcaggctgctcataagagtgagacaccattaattgttactggagaaaccctccttctgggggttttgcacgattattcataagaaggtggaaagaagtgttagtgtaagcatgttttgagtggtcttctgggtgcacatgtgcactaactgtacatatttgtgcatacattgcatgtctcattagcatcttaagtctccacctaggaatgtgtttttactattaaaatgagcaaaagttcagtttgaggacagataaaatcaaaatgcacatgttctctagaagtaaaagtccctactgaagatagcgggtttcaaacgaccccaagtgctccacatcttaaatgtcgctccaacaaagctggaacactatctgctcctgagggatccggtcccatttgtgtttctgagacactggcaagtcaggagtgacttgagatgagaccgatgatttcaagtgtaaaatgcctaaatagtcagcagcttcaggtttcattttggagcttgtccacttaaatgggttgatgaaaatggctcacaagactcatgcctcggaaatggggttttctcctttgctcttagcagattttgtgcaacccaataattaaccttcctgatgcctcaactttcacattcgtgaaaaaggcgccattgacagtgacatttccaggaagccacagaccttgtcaccccctacagaattctgaagctgttcataagcaggccacgtggaagatttctctcaaaagctgttgagcatgaggcttggctagagaaaaaagagggctgcggcacaatggacagtgtctcagacatcaggacagtttccacagcagtttaggaaagaaggcagcgccctgggctgcagaaggcgcaatgctctgggaagaaccctgggtgcagctgaaagaggaacttgagaaggatagggccaatcagttgaggacaacccgcccgatttgggcaaaggtaaggtgcctatgtagggtaataccctcctcaatgctcagcgcagacctgtcctctaggtccacctatgtactcattctccttggcaaagagtcggcatagcataagaactcagcagtgctttggacaccgggaagtccacaccgctctgcccctccctccagggctatgcaccccgggtcccggtacatgctgtgattatagttctgaagcctaccgacaaacaggctgagagcagttaacagactacagctcccagcatattaggtagggcgtgtaccactcggccccttcttccaggcctgtacctcgcccccgagactggcacatgctgggattgtagtcctgtagccctttgaccaaagggctgggagtgtttataagaatacatctcccagcaagccgagggagacgcacacagccccgcctctttctccactgacgggccgtgtccctgaccccagtgcataatgggatggtagtcctgcagccctgtgacacaagttctggtagtctttatgaaactacatctcccagcaagcagaaggaggcatccacatcctagacttttcctccagtaatgcgcactctccctgagccgggtgcatgctgggattgtagtcctgcagcccggtgatgagaggtctgggagtgtttatgagactgcaactcccaccaagcccagagaggcgtgcacaaccctgcctcttcctccagtgacgcgcacattccctgcgcccggtccatgctaggattgtagcgctgcagcccagtgaccaaagggctgggagtgtttatgagactgcatctcccagcaagaccagcgaggtgtgcagagcctcgcccctttctccactgattagcgcactctccctgatcccgatgtatgctgggattgtagtgatgcagcccagtgaccaaagggctgggagtgtttacgagaatacgtatcccaaaaagcatagcgagaacagcacaggtccacctcttcctacagtgacgcgcgttgtccctgagcaggatgcatgctgggattgtagtcctgaagccctgtgaccaaagggctgggagaaataaagagacaacatctcccagaaagcccagcaaggcgctcacacgcctttctcttcctccagtgaggcggactgccccggcgccccgtgcatgctggaattgtagtcctacagcgatgtgatgaaagggctggtagtgtttatgagactacctctcccagcaagcccagagaggtgcgcacagacctacctcttcctccagtgactagtgcactctccctgagccagagatatgctgaaattgtactgctgcagccctgcgaccaaacgactggggtagttatgagactgcatctccctgcaagcccagcgaggcacgcacagctccacgtcttcctccagtgatacacactgtccatgaacccgctgcatgctggcattgtagtcctgcagccctgtgaccaaagggccaagagaccacatctcccagaagacctagggagacgcacacagctccgcatcttttccccgtgtcgcatactgctttgatcccgatgcatcctgggattgtagtcctgtagccctgtgacaaaaggtctgagagtctttatgaaacaacatctcccagcaaacgcagcgaggtgcgcacaacctgcccctctttctgcagtgatgtggactctccctgagccccgtgcatgctgggattgtagtcttatagcactgtgaccatagggcagggagaggccatgggactacatctcccaggaagcccagcaaggcgcacactgccctgcctctttctccttagactagcgcactgtcactgagctgggtgcatgctaggattgtagtcctgcagccttatgaccaaagggatgggagtgtttatgagaatacatctcccagtacgcccaggaggtgcacacagccctgcctcttcctgcagtgattagcgcactatccctgagctgggtgcatgttgggattgcagtcctggatctctgtgaccaaagggctgggagcgttaatgagactacatctcccaaaaaatcacagctagaagcgcaaagccctccctcttcctccagtgacgcgcgctgtccctgagcccagtgcatgctggggctggaagtgtagtccttcaggcctgtgatgaaagggctgggaggttttatgagaatacaactcccagcaagcctggcgagtagcacacaaccccgcctcttcctccactgacgcacaatttccctgagcccggtgctggctgggattgtagtcttccgcctcttcctccagtgacaggcactgtctcttagccaggtgcatgctgggattgtagtcttcccgccctatgaccaaagggttgggtatgtttatgagaatacatatcccaccaagtccagcgaggcgtgcacaatcccgcctcattctgcagttacgcgcactatccttgatcttggtgcatactgggattgtagtcctgctgccctgtaatgaaaagtctgggtgtctttatgaaactacatctcccaggaagccaaaggaggcgcgcaaaactgtgtctcttcacccaggcacatgcactatccctgatcccggtgcatgatgggaatgtagtcctgcagccctgtgaccaaagggctgggagtgtttatgagacagcatctctcagcaagcaaagcaaggcctgcacagccccgccttttcctccagtgaggcgcactgttcattaaggagtgttcatgagattacattttccatcaagcccagcgagtcacgcacagctctacctcttcctctgccggcgcgcactgtctctgattccggtgtatgctggaattggggtgctgcagccctgtgaccaaagggctgggagtctttataagactacatctcccagcaagcacaagaggtgctcacagccgcacaccaccctccccgccccactcttctttcagtgaccgcgcactgtcccgtgaacctggtgcatgctggaattctcccgttgcgggattcaggaggatgagagagaccccgggttgaaacaggagaatttttattgagtgcactcagtgtcaggcctctgagcctaagctaagccatcgtaccttctgtgacctgcacgtacacatccagatggccggttcttgttttaactgatgacattccaccacaaaagaagtgaaaatggcctgttcctgccttaactgatgacattgtcttgtgaaattccttctcctggctcatcctggctcaaaagctccccgactgagtaccttgtgacccccccactcctgcccgccagagaacaatccccctttttcctttacctacccaaatcctataaaatggccccatccctatctacgtttgctgactctcttttcggactcagcctgcctgcacccaggtgattaaaagcttttattgcttacacgaagcctgtttggtggtctcttcacacggacccccatgaaactgaggacaagctaactcacatcaaaaagactgggcccggaacaaagacagaacctgacttttatgcacatttcacaaaaggtggtgggctagcttgaagcaagtttacagtggcgtgaaagcagggatacagaggcaggacagacaggattgcacatgaccgttgccaagcaacccacatgtccattttctaggtttccctgggcatgggcttatcctataaccctcactatggtgcccaaacagctgtagttcagcctactcaggcttctcatgacttacattgtacttcttagataaaacagaatacttgaagtcactagttacagagaacaagaatctataaactcattccgtaaaaaaaggaaatttgtttttcttttcccgatgttgggggagcgttgggagagcctccagagcacattagataatattatcaagactattcctggttctgggctgtgcctgttgaagcctctgggacaagtcagcccaatacaagaaaatttatttctctttctttttaattttatttttctttaatttccctcctcagtcccacagccctgtgaccaaaagactgggagtgtatgtcaggcctctgagaccaagccaagccatcgcatcccccgtgacttgcacgtatacgcccagatggcctgaagtaactgaagaatcacaaaataagtgaatatgccctgccccaccttaactgatgacattccaccataaaagaagtgtaaatggccggtccttgccttaactgatgacattatcttgtgagagtccttttcctggctcatcctggctcaaaaagcacccccactgagcatcttgcgacccccactcctgcccgccagagaacaaaccccctttgactgtaattttcctttacctacccaaatcctataaaacggctccacccttatctcccttcgctgactctcttttcggacgcagcccgcgtgcacccaggtgaaataaacagccatgttgctcacacacagcctgtttggtggtctcttcacacggacgcgcatgaaatgtacagttacgcttctgttcacttgtcatgagactgttttcttttacccccatgaacgtacttaccatagcttctttcaaatcttatctactgattacagcatcttgcacatcttgagaataggttctattgtctgctttttatcttgtgaatcgattacactttcatgcttcttcacacatctcatgaatttttaaattgtgtgataggaactacagggactctggattctgttgtatttctttgaaaattattattttaagagggagttaatttgaatagattcaaaccccaatccttatctcttccacagtggcatagataaaatcttcattcagtcttctaaacagtgtgcctttctatatagcaaaatatagtattttattaagctttattattgttatctgtgaaatagttattcaacgaactagtctacttcattattactggaaaccagaacctcagttgtgttcactttctggattttatataagtgaaattatataatatgtatacttttacatctactttcttctaggcaactttatatttatgatattaattcatgctattgcagatagctatagtttgtttatttaaaaaatattttttacattttggcaaagtatacataaaattaaccatcttaactattttaagtgttcagctcagagaaattaactacactcacattgttttgcaactattattcccattcataaggatcttttttcaacttccaaaccaaaattcaatacacattaaataacagctccctgttactccccctccagctcctaggaaccactcttctacgtgggtttccagaatttaactactctaagtatctcataagtggaatgatacagtatttgtccttttatgactggctcatgtcactttgcacaatgtccttaaggttcatgcatgacgtaccatgtgtcagaatttccttatttttcataactgaataatatcccactgtatgtataaatcacattttatctatttattcattgatgataattcaaacaacacaggtaattcaaaaaccttttgagtgatgtgagtcatgctgctatgagcttaggtgtacgtgtattattttgtgtcttcgctttcacatcttttgcaacataccaagatgtgaaattgctggatcatacggtgattttgagtgtaaattatttcgttactatggtgttgttttatagcagctgcagcattttacatttccaccaagtgtacaagggttctaactgctccacttcctcaccaacacttgtgattttctgttttttttttctttttgtactagttatgctgatgtgcattaagtgatatgtcatttggggttagattttcattttactaatgaaaatgaaaaggttttgttgagtaccttttcatgggcttataagccacttcacataatttttagagaaatatctgtttaagtattttgcccatattttaaacaagtagtttattattgctgaattgttctttgtatattctggatagagtcctctttatctatttttcttttgtttcttgcatttttggtgtcctgttaaaagaaatcactgcgaaatccagccttatgacgtgttttacctacattttatactaagaattttgtagttttagctcttacatttaggtctttgatccagttagttaattttttcttatagtagaagttaagggcccagcttcactcttttacatgtgggcacccaatttccccagcactaattgttgtaaaggcagttcatttcccataaaaatcatttgaccttatatatgagggtttatttatatgggccttctatattactccattagtctctttgtagcatgctattttggaattttgtagtaagtcttgaaatcattaagtgtgacttgtctaactttggtatttttttcaaaattatttttgcaatttaaagatctttgagattccccataaacttaaaaattgattttttaatatctacacaagagtaattggcattttacttcttcgttacttcctaactactttattcttttgatactattgtaaattgaattgttttcagagttttcttctcagattattcatgttactacataaaatgcagtttgtttttgtatgttgattttgtatgctactattcagctgaatttattagttgtaatattttttggtggaatcttaaagattttctacatataagaatatattttctgtacacattttgatgcagtttatttcattgtcttttttaatttctctgaatgaaacttctaatacagtgttgaataaaagtggctagcaagagcagatattcactctgtcttcggagcttagaggaaacacttttgatcttttcctctggaatatgttgtttgctgtgggtttttatatgtgaattttacaaagctggtttccttttattcctaatttattgtttttattataaaatattttgaattttgtaaaatacgttatctgtattaatgagagaatactttttaaaaagtttgtcaatgtggcatatgcattgattaattttcatatgcttaaacttttgttaagaaaggctagctaagtgaaccagtgagactggaaaaagaataaagaaatctatactggttgtgatcaattatttgtaaacaccactgcactgaaaccacccatatgctaaaacttcctttcattccaataataaactccccttggtcatgggttgtaatcttgctagtatgctgctgaatgtagttagctaggatgttgctgactagttttgcatccgtgttcataagggatattagtctatgggtttttgtagtatctttgtctggcttcggtatgagctaatggtggcttcatggaataagtttggaactgctctcttcaggcttttggtagactttggaaaggatttttgttctataaatgcttgatctaaatcactagtgaagccaacaaaataagggcttttctttatgaagaggcttttaattactgattccatttccttagtagttttgtatctattcagattttgtatttctttgtaatcaagtcttgtatacctaggaatctgcccactttatctacgttttccaatttatcatcctatcatagttcacagtacagttttttaaacattttaattctttgaattagtagtaatgtcccactttcatttctcattttagtatgtgaatatgctgttaattttttgtgtgtgtagctgaaagtttgccaattgttaattttttgaagaagtgagaatgaacttttggttttttggaattctgtggtttgtataatctccattgcatttatctctgctaaaagctttaatattttcttctttctctttgctttgcatctaatttggtgttatttttctaatttactaggtgataaagttattatttatttgaaatctttgttctttttaaatgcattttagctgcaaactttacatcttagcactctttttgctgtttcccttaacttttgatgtgttttgttttcatttttcttcctctgtaagtatgttccaacttcctctgtgatttcttcctttacttatttgttgtttaagggtatgttgtttaatttatacagttttgtaaactttctaacgtttcttctgttattgatttaatttgagatctactacacagcccatcgtggggaaatccccatgtgcatttgagaagagtgtgtagtctcttttgttggatggagtatattgtatatatctgttagatcaatttggttcattgagttattcaagaactctatttcctaatttatcatctatctcatttttctattcattactcagagtggagtattaacatcttcaactattattttagaactgcctttttgcccctttaattctgtcaagttatgctttctatatctcaatgttttattattaggtatgggtttaaactatttctatcttcctgccaaatggacaatctatgactatataatgtcttattgtctcttttaagtttttaagtctattttgtctgctattaatatagtcattcccagtctctttttcatactattggtataaaataattattttcttcctttttttttataaccctcaagtcctgtggaaggctaagagcagcattacttaatttaaaaagcagataaatcttaaatccatagtttaatatttctaaaagcatttaaatggaaatgagctacgcagtctaccaggaacgaaggatatcagttgggtctaagaataatcatgtcaaaaagctctaggaggaaaagctgctgggaattaagactgtgataacggtctttgggatcaagaaggaaatggggaattggggatgctcaaggtcaggtacatgcttagcaaaagacccagaaaaccctaagctctcacctctgcattttaaactctgcacaagtagaaagtagaggctcaaggagagatgtaactttatgctgattggtaaaggcatgctccaacacacatacatagatctcaggtgaaaaaatcagatatttatgtttagtgagagttaaaaaatctggagtcttactttccaattaaggtttagtgaaaatatttggggagatttgcattgatcaattcatcctgaggtcaagaaaatcttgattttggcatttggagcctctagtaaaggactagcctcctcccagaggtgttctttgggcttttggactcagtgacacactactggttacactgatttgaaagtcagctaagagcttgctgcagaactcctgacaaactcagtttcacccatagagggctagagcatccccagctggttgaaattttatgcctccttctatcctctgaagcaaagatgctgtctctgtggggcccccaatttactgagtgtttcctatatgactggtcctggttcatagatgagtcagggaaggtgaaacctcatgatgtccactgggctgctgtggctgtttaacctgtgccagccatacagaacctgacatgagtggttgctcctctcaaaggtcagaactcagggtttgggataatggcacatattctatctgtttggttatctacaatggaaactgtagactgtctgaatatcttttgggctgcaaactggagacaatctcagatgctgatctaactggatcactcatctagaagtccatggtaagggtttgttttctagagagtgacaacaatcaagctgcagattgaacctaaatctgtgtctaacgcagagtctaatactgcaaaccagacttggggttgctggtgaaagttgacctatttgtctcatggttgaagaattcctagaccataccaagcagagtaaccagaagtggacttttggcccacttcttgagatatcagtcaccactcttgacatcttcagcataacagtatgccgacaccatccataccatgtgtcccgtgaagctaatctgtgccatcttttaggcttttgagaccaattgagctctgacttcgcggcatttttcaccacacgtactaaaacaagccaactctatgatgttccctccttttccacacatgctggttagataatttgttgattaggtatggtttattttctcttcctgattgcctccaagataaggatgaaatgtttgggggatctaggaatcatctaggaatctatttcacaaacttggaatttcgtgctaataattcctgggtgaaatgtgactttctttcccataactgcaattctaggcaagcctggcttttgtatcctctgagttgcatctcagcctagtagcagttatgggactccaacttagttccagctaagttttatgtaaatattcttgtctctattttacctggctctagtagataaagtgtctagaaaaaagtagagggcgactagaataaagatgagattataggtaccggaatgagacacactgattctgtggaagtagtgggagaacaacctggaacctggggtatgaacaacacagacctcggaagctacgggaaacggtgggacattaacaactttttttctttctgaacaacccctggtgcagcccacagaaaggtctggaaatactattagttagatcagacggtaaggcagaggctgtggattcatctccttttggtccccacattactcttaagaatcctttgagactattctatctctccgtgatgtaggcatggaactctagtgggcagtgtgcactctcggtgcccatggttccaggccacagtttttcagatgatggacaacaattgctttttcctgaagagacttagtaccctgtggctgagcttaagcgggactctagacagcattgattgcattttcttcttcctctacgaactgggatttctccttctgtttttctactgcctagaggtgaatctgtatttgtcaatatttaggtaaatcagagacataaatcaggtaaggaaccctagacactgcttctaggctagctggactcttgcctatttcccttctcactttatgagatcaattatattggcacaggttgatacccttagatagtgtctctaaggagcaattagagaagcatacttctagagaagctggtaggacagggcaggagggccaatgaggatcaaagtttctgtccaaatttttgagcctaggtgtgtgtggccgacgaatccaggaaagatcccagatccctggaagggattgttaagagaggatccattagattagaatgctagggtgggtgttcatccgtcgccttctgagtgggattttcagggttaagactgaggtagggctgcagagaaatgctatcctgggaaagcctctgatcgagtgcaacataggtggctccagcacaaggagaagtcctctatttgaggaacattatacttgtgtggatgtgtctgtgctcttcctcagcagagccccactgactgaatgattgtttgagaattatgagtaaagagccctatattattttgaatttagtaaatattggaagagaaacaaacaatattatctactttcaaattgaataacagcatgagcaactttcaggaaaatgtcacaggaggaaactccagggccttgctcatccctggaaaccttgaaaatcctgatgcaacctgtagggttaaacttatcaatacttaattttttgccatatagatttatcttcataaaaaatattttcattggaccttcattttgatatatgccatgaagaataaatcatttatttcctttgtgataagaacatcacatttttacacctcatgtataaatgatgccatcacccatgtagtttttattgctatggcctgaatgtttatgtcccctttcaaattcatgtgtataattttaggcgtgaggcctttgggaaagtggtgaagccaagagttcttcatcttcatgaatggaatcagtgctctttcaaaggaagttgaagggaatgcccttgtcccatgtgcgagatggtaccatctatggggaatagggctctcaccatatacgaaatttgctgctgccttgatcttgcactttccagactccataactgtgaaaaatacatttctcttatttatcctttacccagtctaaggtattttggtatagcagccaagatgcactatgacactttcttagacactttggtttatttctgaatttttagtttcagtgatccatgagttttttaatcaatcaagattttacacagggcttgccagtggtttttttttttttcagagttttcttgtctattcttgtttgtgttttcatctatataacattttatagtaacgtgtacttgcaatatttaatggtatcagtataggaacaaaattgaatttataaataactataaggacaattgatgttgataatattgagtttttctgcctaagaatatgatacaaattgtctatttgcttatgtctacattcatatatttcataaactttctatgttttttccatattccgtagatatttttgtaatatttattcctagtttattctgctaaaaagtaatttgagacacaatgaaattgcaaagtgtttatttgagtaagagcaattgataaattataaaatatcagacggaaagatattgagtgcttcattgacagtgtaagaagcaagtatttatttgaaaaatgtagaaacaaagaaatcatttggtggtagcacaactttttttattgttttttgtttgtctgtttaccttgttggacagtttctatttatataaggttgttggctacttctgactggttgagcttcatttctcttttttcaatatgcagctacaagaaataatttaagttttgtttgtatttgcaaatcaagcgaggttgagatcacttatgagacctaactaattttgtctgctcagagattattgagacatgatctccattttaatttcctttaacaaattttctgtacttttactttccatccaaacagtaacttataaattattattgttgtacatatgtaggcccatgttgtgtatgctttgaagacctgtcctgcattcaaactcatttgtattatgttattattgaatttgccccatttattggaattataaactgcaatcccccaactacaagaggtatgagctctgatgagataagagtaaagatgaatcagaagtgaaaacagtcctccaacccacacatgcagtaaaaacaaatttcacatgaatacaatgagtaattatctaaaatttaaagtaccctgaaaacattaatgtttatctcattattatgtaatatggaaattacaaggcaaaaaaatccaaagacttactgtttaaatataattgaagttttttatatgatgaagtgctccataatttaaatgtaaaaagccaataggaaatatatgaaataaaataaaattatacgtaaaagtgacaatgcctctattagatttaacagtatcttacaatagaataagttgaaacctacaaaatggaagaaagtttaaaattaggcagatattatcagcctggtgaagaataaatacatatgtcaataagcatttaatgtattttgtcttagattttacatgaaataataaaaagtaagcaaaccaatagcatggtagtttcaccctgattgattcaaactgaaaaaatattaacatttctccatgagaagttggattcatggattggcctcatgctgcattcaaggcactttagccaggatccaacactcattgccaagagtcagcaggctagaagtttgcttttaagatgttccccggcctgcgaccaagacgctttttcctgactacttcttcaactctgacataggttttgctgatataaacgcaaacccggctctatacctaccaagtatctacttggctagagctgcaaatggagcatttaggcactaggcaagagctcttcccacgtttccaagcacactttctagaatttcccaaaactactgacattgtctttcagaccccatctcccaaagagaatcagagagatggtctggaagccatttagaatctccagcctccaacctagtaacaatggacttggatacaaagacgcaacctactgacctcaaagacaccagcccagattctgggcattgaattcctgcctccccatgaaagatctcaactgagtcacatcaaagcccacactcttcttcaaggttcaccttccagacacgctccaaaacagtccctcagaattgtcttgagatgaaacaaaaggtgatgaaggtccaggtttggaatgcctgcctcattcttcactcctgaaaagtctacacctgctggttagcactctcatatgttagggagcccgggctctgagtgcatcctttaacaggacctcctggccttttcctacttggagtagagtgcccaagaataatagggaatacaaggcctccactctcacatggcttgattgactgatgaactgatgtcggaggaggaaacatatgtagggaacagcctgggtcttgtgaatccgtttcccagctatgatgcctgtgcaaatggagggagaatcgtcaagtattattgggtggtagacagacactgcctaataaaattaagtaaatgtaaggtgacttgaaggggaatttatcatatgtcatatacaaaattttagttggtcaactttatttaaaaacagtcacaatttgtaagggcattcaaatataattttaatagggagctatgaaaattatctgcacttgctatgtaagtgattgagttaggggtaactatctgaaggtcatgagcttgatatctgctacttaatttcataagacatttacttgcaaatggttgccatttttgctctcactatatgaaaattttttcttgcaaagagcattcctatgaaagaaaaactagaaattttgccaatttcggctattaaaacgataaaactggtttgtttgttattcttaaccaaatgctcttacagatgacacatagtacccatgctttgattgttttttgtttttcttttcaccttaggtcaattgcctttcattttatttatcaaactgtatttactgtagatagacattgcagttctcatgtgccctatggatttgtactttcttagaagtatgaaaaaattctcaggctgagtatattggcttatgcctgtaatcccagcaatttgggaagccgaagcaggtggatcacctgaggacaggagttcaagactagcatggtcaacatggtgaaaccccatctctctactattcacagttcacattgtaccttgcaatgaatatacattttatccaaaaaggctaaaaaataatgaaattggggtggaaatggctggaagtataggtgaaacaaaaatgacacatgactagtagctgttaaatctgggtgactggtctgttatcctttttttgtattatgtatacgtttttaatgttctgtaataaaacacgtgtagaaaatgacaaagtttatctacacttagctcttaaggtcttggttacctttgggaaggagaaagtgtcaagggcatgagcaaatctgattcttacatacacaagtgtatttatttagtaataattcatcaagcattccataaatattttgttcctatattgctgtatgcatgttattcatcaataaatatttaaatagtacatatttgcataacaatcctaaattaatattttagaataatagtaatgttttgttttgttttaaagtggggcgtgttcactcaggacatcgtcaggtgtatattaatgttccaagatatttatttacgttttaacttttggaagagtcccctaggtcttttaatttttacctcagtacagtaagtagcatggttttaactttttggattgcagctttgttttcagaaaggttctccccgaagaatgatgctcaccccggccagcgcacacagcacagtgacccgtgcacaggatgcactgagcacacacggcactgggtgaaccatgaacagaaggacaagccagcctgggtctgcaaaatatactttgcaggaaaagcaggtaaaattgaaaggtcacaattcagcagcaaacgtttttacattcatttgagaaatcatttctaacaaaagctgctcgttaaagccatggttttctggcttgcctacacattgtaatcacctgcacaactttcaaccgtatttttttcagatccagctccaaggattctgatttagttgtgcggttacaacttgggtttaagggattttgatagttttcctccccgcaggtgactctcttgcgccaggggtaagaagcgctggataggggtgaggggtgctttagctgtgagagatagccatgtacgcttcaggatttgccccatcgcatatctggagttcggggtcttagaaaatattcttgccctgttaaaaattaaaggatggcttcaatacaaatttagctatttggctacgttgcagaaaaagaaaatgcctttccagagatcagttttttgagtcagagttttgttctgtcagtgaggctggagtgcagtggtgtgatcatggctcactgcagccttgacctcccaggctcaggtgatcctccagctccagccttctgagtagctgggactgaaggcatacaccaggcatggctaatttttcaattttgttgttgttgttgttgagatggctttctctatgctgcctgggctagtctcaaactccttgcctcaaatgatcctcccacatcagtctcccaaacagttcaacctacacgaacaggcaaccatgcctggtgtatttattaaaatgtagctactagaatatttaaaattcacatgtgcctcacatattatttcttagagaattgcctcatttttgaaatctcaggctgcctgctctaaaacctggatgtgccaggaaagtaaaacatctgaaattttaaaacaattgtcattatattgcttccatgtatgaataacacatatatatttttcataaatacaaataatcttacacacaaatgaaaatgcaagtattttacaggcagggccagtgtccagtgcatgaaggaagccctgccagaaaaggatccaggaaaaacttataattcttgctttattcaatccagtgtcaaatcacatatgtcactcatggcctgagggggcttggtggggaattgaactatatccaatcatgggtgctggagtggaaattatctaatcaggtgcacagctggagaagaatgggcagctttttggatctagggatgcctttgcctgtctctctactcagagctcaggacactagagccacctcaacgcaattgcctgttttttagttgttttaatgctccaaaagagaattagttttctcatgcattttccaaatgtgtggcaagaagagcctcaaatctaccaccctgttaccccagcctaactctggcttgctgtcagagtttaaatttccagttctttcctgacacttaccaacactaactaaccttgtgtaactcacaacattatcaactgttctttattgtacattttagacacagtattttaattctgcattttttcaaaaagcagtggatgacacttaaaaaaatatttttcatttgtaaacattttacaggacatgaaagcagataataatcccctgacaatccacagtaaaaaaaaagaaaagaaaagaaaagaaaatatttgtgcccctttctttaatcttcccttggcacagacaccccatcagaatgtttttgggttgaggtttcatttcagaaacctcacagggcaatacatcctcagccatcttgtgttattttcttggttttgggtttcaaaactgtttgagaatccccaagataccaacactggccatgactcttgaagtgtctagtaaataacatcccttgtgtcatctcctctcagggaacagcccaaggtatgggaatgcagcctctttttggagtggttggatgcactatacctggaaggaatctccacgtatacatttgcgctaaaagcaaaccctttaggacattaagaatttcttaccccaacgcttagtttccattccttagagacacattgcatgccaggcaactggatgctgaatagtgaggaaaaaatgtcctcagattggtgaagggagagaaaatatttcaaaggacaaagaaacccaacctagtgaggcagtgcaaaaacctgcaaagtaaaatgcacctcacagacacagtggagcagagcgtagcagctcctggtaggacgctcatgacccacatcactgaaccagatagaagcagggaaaatatcccaagtaatagaacggcttgacttgacccttgggtcagatatgtctgtgtttcaatcaccattgtcaccttctaattttgtcaccttgaaaatatgattgtatttattttaacttcactttttcattaactgtaaattatgttttatcagtagagcttcaaaggtatgagaatatttataaagcacattaagttggtgaattttgaataaaattaagtagtaatgtatttcatttgttaaaaattgttacttacctatttcctcagcagaatgagtgtagcatgtctcccaggtctgttttttatttgtttgagaggtgatttcaagcagaatctcacagcttactgttggaaatgctatcagttgtaaagatagggaaaatctctcttccactacggtggtaggaaatgaatacatatctgcaagcacatgaggtagattaattgtcaaattacataaatttatcacataagttattctttttttcaaaagagagaacttgtgaaagtgaataactctattccatatgctgccatctgggtgtttgagggtaatgttaagttttaggagctgggactttgcacctcctggaagtgttcacatatgattaattgtttactaaatgatttgttttgaacataattaaattacatgtttattttctgaaagggatagatactttggcttttcttgatgaattataagatataagccccttataatgtttttattttattttattctgttattttttagatgtagtttcactcttcttgcccaggctggagtgcaatggcaagacatctgctcactgtaacctccaactcctgggttcaagcgattctcctgcctcggcctcccgagtagctgggattacaggcatacaacaccacacctggataattttgtatttttagcagagacggggtttcttcatgttggtcaggctggtctcaaactcctgatctcaggtcatctgcccgcctaggcctcccaaaatgtagggattacaggcatgagtcaccatgcccggctgtaatttcctctcttttatatcttagatttgaataatttttgctggattcttcaaacatgaagtattttttgaattgaaaactaactgaatgactaactggtaaatagaagtcttagaccattgactaaaagctaaggcccaccttgaccctgcaaaagaggaccactgaaggcccagttgattattcctgggtgtctgccctgcaggtgtccaagcctactcacaccaaccatggaaggagcctttgtcactgccagaagatatagagccttggtaagctggaagttcacaggcagatgcagttgaggttgagatagaagaaatgttgggagattctttttagaatggaattgttattgtcctcagactgtttctagacttggtctaagaagttacctaagaagtattgcaacaaagaaaaagtacaaatgattagatctttgagtatctctaaggttaggtggaaaagggccttatttcatagggaggagaaaacaagtttacaaagaaggttggaaaggaagcacacgatggagggtagcaaaatgcgatcccagataagataatgtttcaccttgaactcagcctgttcttaggaggggtatgtataaataagggttgtaggtttgctgaagctgtgggtgagtcaaagttcaggggctggttggaagaagagaaacaagcaaagtttctttaagagtatgttatttggaccactgaagactaaattactgaatggttgttcatttttaaaaatgggaatttgcaatctgtgtccatttttgtgataggttaaaaaaacagcagggagcatcctcaaagtcatcaggggaagcacgtttctcttcactaagctgttctttgagaatgcaaagaatgggggaatttctttaaatatagctatttccaggattgccttcacccacaactgttccttgccctagacatctcttccatttggctgtttctgagttatatttttataataaagtagtaaatataattacagttatttgttgaggttttctttttagtaattctatcaaattatttaacttgaaaaggggtttatgctagtctcagatttataggaggtagctcagaagtgtagatgggcttcagggatgtgtaactctcctctacagtgagaggggtgatgtgggactgagccctgaatttctgggatctgtgtgaactctaagttgtgtcagaattaaattttggggcaacaaatgggtgttggagaagcagtgggttttcagggaactttacacatttaggatcaaaagtgttgtaaggagaaagacaatgtgggggcctctgctggagagagactccaggtgtctcggggaaggtaggctctgctctgcacacaggctgctacaccatgcactgccctgtggttccaggcattctcccatggtaagaaggaccgacgactctgagggaagaagttctgagaacagatgccttctaccctcctgccaacctgaggccaccacaggtttttcacccactgaacatacacactgcatgttgatgtggccaagcccctctcaggacaaggctttggcatcaagattgttgcccatgctacctttcctcatagactttcccaccaaaaacccacacatgtgcctacaagacccctggcatacgttctacctcagacaccgaatctgcaggggcaacctggttttttcaccatcccaggtttctgtgccacctgatcataatctcgtcttcctgcatggacacagaaataagtcagagtaaagtttcacctgggtcagtatctgtagcatgaaccagtccttccaccaaccctgtactgtctcccaactgtgggttcttaatagcaccttcccctcttttaccttttagttcacctcaaaccttttatttacgtgcacttagtgtgtccaagccacccctcagttgcctgaatccagcacctactaaaattcagatgtccagtagttcaagaccatgggcctagaccatgtttttgcagaaggaaatacatattagaaatgagaggctctattctcccatttgaaaattaaaaaagatattttttcttttcccttttcttaaacaatgtaatttagagaactttttttagtaattttttgaaatggaatcttactcttttgcttagtctgaagtgcaatggcataatcatagctcactataaccttaacttcttgggtttgagcagtcctcctgcctcaacctcttaattacctaggactataggcatgcacctccaggcctagctaactttttatttatttatttatttatttatttatttatttatttatttattttttcaagacagtgtcttgctctgtgggccaggctagagtgtagtggcatgatcttagctcaatgcaacctccgcctcccaagttcaagcaattctcttgcttcaaccttttgagtagctggcattacaggcgcacagcaccatgcctggctaattttttattgttattatttttaggagagaaagggtttcaccattttggccaggctggtctcgaacccctgacctcattatccacctgcctccgactcccaaagtgctggtattacaagcgtgaaccaccatgtccagccatatttattttatttatttttttatggtgacagaatttcaccatgttgcctgtactggactcaaacatttggcttcaagagatcctcctgccttggcctccccaaatgttgggattacaggcatgaacagccgtgcctggcctggaaaacttttatatgtatctttttttctctgcttctttgaaatataagcaaatcattttaacagctaaataagccttttgccactcttcatgacacagaattgtctttgtctaagacctggaaactattgttttgttttttaatttggcaaagatttattgattttttattttcagtcttttgaagtaggcacagctcagtacagtggctcatgtttttaatcccagtgctttgggaggctgagatgagagaattgcttgggcccaggagtttgagaccagcctgggcagcctaatgagtctccttctttataaaaaattaaaatcaactagcagggcatggtggcacaggaggctgaggtgagagaatcatttgagcccaagagtttgaagctgcaatgagccatgatcacagcactctaccacagtactccagcttgggtaacagacggagacctgtctctaaataaataagtaaataaaaaaaagtgtttttccatacataaaaataagtaaataaacagataaataaaatagacatggatttgctgagaataaagctaattacaagataacagaaaagtgagaaccaaagatggggttcaccctagcaaatgattccagcctattagaacactcagaattttccctgcagcatgaccgacatgaaagtagaatgtcatcatgtcaggctgtaccagcgtcgggagactaaacactgtggggaagaacctcccttatggaatattatcaacaggtgagagcccagctcctgccctgatgggctacagaaatgagttcctgagataacacattgcagaaacatgcatagagtagtttaaccttttttgtgtgtaaccctttctccattttcctgcgaaatcctccctagtaatagtgttagcttttaagttttgagggtccgataggactgaagctgcatgctgcaggagatacgtggggccggaaactaacacaaactgcagccacaggcataaatactcatggcctaatgtaaagtgaaaactatacaaaattctttaccgttattcgcacaagtgtgtgaagagagactttccacataaccaacttgccactgagactagtgaaggccagattccactggaacaaggctatgagttactcatgggaaggccgtaggacaaagcccagagatttttcatatttgagtctgggtcctgtttctttccctgtcttctcagctttctgtctgtagagacccctatgtggctgctctcagcacagcccagtgctggctgtgtttgctggtttagtgcacctgctctttttccaaaaagagggaggagttggccacattaaactgaatgatgaagctcctcatcaatctgaatgcagctttgtaaatgtgcctagaaaccacgcaaagaaaagtctgtgttcttccttgctttgaccgtatgtgacacctccattagaaattctgcttttctctgcactccagcctgggtaacagagtgagacttcatgataaataaaaaagaaagagagagagaaggaaagaaagaaagagagagatggaaagaaagaaagagaaagaaaaaaaaaagaaagaagaaagaaagaaagagaaagaaaagaaaagagaaaagaagaaaggaaaaaagaaaagaagaaaggaaaaaagaaaaaagaaaataaaagaaattcttctcttcagattaggcacataaggagaatctgtataaatctccatgaaggaaggaaaccagaggacaagttaaagtcttggaattcacatctgagtacacagactcgttctccaaccctcttctttttattctgccagctatggcctaggtatgaacatgacaggtacacaagagttccaacacccgacaatctacttcagtccaagaagagtgccctccctcttgctccccatccaactcatggtactaagaagtggtgtgggactgcccagatgagttgacaagagaggctggcgtggaggggcctgtcctgggctgccctgtgttatttgtaggtgcacccggccaaaagccagggaaatcagtgatgagggctcagttgacatctgtgttatcagataagacttttacattgagcctttgtaaggctgaaactcagaaatttcagggcacaatgaaagagcatctcactctcttgagcaactctcacaaacagaggtggatacagagctgtctcaagaatgtggattcctggtttcttaactgctgttgggttctgacaccaagaaagtatgttaaactcttcaaggttccatctactgggccccatgtttctgtaagacataccgaaaggccccactatgctactgattgctcagtctcctcttccatgtcaactctttatttgtacacaattatgcaaacacaacttccccttaattccctggaaagacctaaatgcaacctgggttccaggatagaagagacagctggaacataaccttgtttttcttaccatctctgggacccagtaaaagtcactgtattcaaggcttccccagcctcctaacatgcacactggtgatgatgctaacatctacttcctagggaatgtattaggtgtatataagataagacataaaaataatgatgtagtgtcacctgtagataatgcatacacttagagatggaagcattaggagaataggtgggaggtagcatgggccacaactcaaacaggcctggtgtctgccagggtgatcttggaaatatcacttctccactgggcctcattttcattctgctccagtatgaagttgaaattaaatgtagatactgtcctctggcattcatatagtttagctgtgcgtccccacccaaaactcattgtgtattataacccctaggtgttaagggaaaacctgaggggagatgattggattatggggacgggttctcctcatgctgttcttgtgatagtgagttctcacgagatctgatagtttcataagcatctggtacatcccatgctctcactcacttcacttgtcagccactgtaattggaaggtttctgaggtgcccccacaattatgtggaaatgtgagtcaattaaacttctttactttataagttacccagtctcaggtactccatcattgcagtatgagaatgatctaatacaggaattcaactttctagtgctttctctttatatttagaatcatatccatgtgccttatcacgtctatgacagaggaagtcttcacaaagtctcccagtactaggtattgagtgactcagttttttattgaataaaatggaatacttcctgatgccagtactatggcccttcggttttgaggaaaatatcatcttgtatgttggctaacaaggagataggagttcaaatcaaatttgttttgtcatactggctttaaggcagtgattagaaaaggcctaataggtgggttctgtaggggattgctggaaggaaagtaggaatatggaaagtcatgagacatatacagtcatctcttcttgtttcctcacaggtcacatacaaattcagggagagttagtatgaagcacacaatggaaatttgggctccaaagtctgcaaagtgatgcttcatggacttcagttggcaatattggttccaacaatttcagccaatgtttaaaaaacttatagcagttaaatttttagtgtttcaacaagccgtttcctatctttcattctgaagatccattttttaagtctttttttttaacagtatagggggtacaaattcagcttctctccaatgaaacacagaaaaggatatcacttttgtattagttcaggctgctatgccaaagaaccatagataggcagcatatagacaacaggacttaatttctcatacctccagaggttcaaatttgagatcagggtgtcagcatggttgagatctggtgatgactggcttctgaatttcagcctgcacacttcaggttttaccctcattttgcaggaggatgagagccctctgcggtttcttgtataaagccagtaatctgtattatgagggtcccaccctaagggtttaattacattctacctccttatagcattacgcccggggttacaattttaacacaaatatagaagaaaaattatagtaactctcaagttttttttctttctttctttctttctttttttttttttttttttttttttttgagacacagtttcactcttgtatcccaggctggagtgcagtggtgtgatctcggcttattggaacctttgcctcccaggttcaattgattctcctgcctcagtctcccaagtagctgggattacaggcatgcgccaccacatctagctcattttgtatttttagaagagacggtggtttcaccatgttgtccaggttggtttcaaacccttgacctcaggcgatccacacgtctcagcatcccaaagtgctgggattacaggtgtgagccaccgcaccctgtcaagatgtttttaaagctctaatttttctcctactgggtttttctcgtttgcgccctcgatctttctgtctctttttgtgtaaacctttttgtctaattctgtctattgtattcctcaaacacaggaagcaagctccaatgctatgagatgctccatgtagagacccacataacaaagggtgagagggtgctcagacgagtagagagaaggaaagtcaggctctccagccacactaaaccctgtcaattttcacatgagtcagcttaaaggctcatgctttcccagtccagcttcagttaagaccacagcccccagtctcataaaagacctgaaggcagaggtagccagctgagctgtgtccagattctggtccacacacattatgagatattatatgttgttgaaaagtgctgacttttagggcaatgttgtcagaaaggagcagatatctaacctcatctcccaggccctaggattctccatccctctgcttatctctttctcaggctgtctgcagccaaactagtccctttttacctctgccaaactcacacctatgagttttttcactaagggtggcttctccctgacacatgcttgtgcagatgcctccctgctgtcatcctcatcatggattaaaagtcacctcagtgaggcctgaggtcctcccatgcaataattttccaggttttcttctcaataatctactttatattatagtccttgctcttttctttcacatatacttgctttagtgcttttgtccagcggtcctcagattgtttggtcctgggttggggggtgcagacatgaagtaataattttctgtaccacatgttggacccaccagggtcgctggcaaatggtgagcgcaagggaaaaaagactggctaagtgattatatgggggatccctaatatcccttccccttttgaccacctgataatgtggacatcactgataacaacatgaggtgtgtgactgttacttgttccagctgctccagcaaagctcagtgggcaccagaaacacagtaggctgtaaccacctcctggccatcactaaccctacagccccaagcaggagcactactgaacaaatctgataccttgatttttctgtcctcaagacactggttcttcaaggtcctaggggataaagtagcaggatctgaaggccccaagtataatgagtgaactaggaatcccgttttgccctctctttgcctccacctttttggttgtgctatttactcatgaggtatcctccccttatccagtgaaattattttctaccactttcaaatgaggaccttaagaacgcaacagtagctgagattttccgtggacctcagcctcagagtccagtgctctggcacatttaactctgtctcatcttcatctacccaagatgcctctcaagtggccatgcctccctctgatttgaaggatctgcagagtgggtgcatttttgcagtctcagagcaagaatccaggctggcagacacttatgagtatgtgaaatcatcaaggtcacccacttcaggcacccctatttatgaggaagaaaacaagctttcctgtaggcactgtctacattaggctgaggtggagcatagctcattttacttccagttgccctcagagctggatgcagaaccccagtcctgttatcttgaaactgacatggagaggaccccatgtgaacagaaccctgaatctgctcattttctgtgctcctgaatgtgtagctacagactctaatttcgaaaacaaacctgataagtgggacggtgccaaggcctaggaagctggagccctctctaatgctctggagcctgcccacctcctgagatctggaccagtctctgcctcttctggggcctcagtttcccaattgtaatgtaatgagaaattaaatgtaaaactgcataaacatatgctctgtgagaatttggtgtcagagttctcaatactggatgataatttggagtggggtgggtttgggacccatgggttctcaggcctcctttcacacccagtgcagtaggtgtagagctctggacagccaggtgttctttcctgagccagctgattacaacacaatggaccaagggctctgatcttaaatatggtttcacaggataccccaccttcagccaccacctgctctgtgcttcccatattttggggagctgatgacaaaccccattatagtgaagaagaacaagaaactagacttgtgggcctggggaaaagaaaaaaacacttctatttctcccaaactgtagaatctcttgtcaaatatttaattttgattatatctgagcttgataatacattcatgtgttaacagctgcttaaatttattttttctgtgaagtgtgggataatgtctttgccgtattttaaatcaaattctaaaagctctctttagagtggataagtgagcatctttgtaatataaacttcacatatttgttgccagtttgttctttttgtttttgttaaaatgttttgttttattctgatttggatgtcttttggcgttttgctttgtggctatttattatgacagtgtaacttctcctctaattgactgacggtttgtacattctcaataaaatattttcataaaatctttgtaaaaattgtgtagtcaattttacattacataaacataaaacagtaaagactatcacgatgaaaaaggaagattgagggcttaaaaagtaaaatacgacacagctaaagtagtctgaaagggaaatttacagcactaaatccccacaagagaaagcagaaaaatgtctaaaatcgacaccgtaacatcacaattaaaaaaactagggaagcaagagcaaacaaattcaaaaactagcagaagacaagatttaagatcagagcagaactgaaggagatagagacacaaaaagcccgtccaaaaaatcaatgaatccaggagctggtttttttaaaagatcaagaaaataaataaacttctagccagactaataaggaagaaaagaatcaaatacatgcaataggaaatgataaaggggatataaccgttgatcccacagaaataaaaagtatcattacagaatattataaatacctctttgcaaattaactagaaaatctagatgaaatggataaattcctggacacatataccctcccaagtgcaaaccagtaggaagtcgaatccttgaataggccaataacaagttctaaaattgaggcagtaattagtagcctaccaacaaaaagaagtccaggaccagacggattcacagccgaattctaccaaaggtacaaagaggagctggtaccattccttctgaaattatttcaaacaatagaaaaagaggtactcctccctaattcattttatgtggccagcatcatcctgaaaccaaaacctggcaaagacacaccagaaaaagaaaatttcaggcccatatccctgatgaatatcgatgcgaaaatcctcaataaaatactggcaaaccgaatccagcagcacatcaaaaagcttatccaccacgatctagtcagcttaatccctgggatacaaagctggttcaacatatgcaaatcaataaataaaatccatcacataaacagaactaatgacaaaaaccacatgattatctcaatagatgcaaaaaaggccttcaataaaattccacacctcttcatggtaaaaactctcaatgaattatgtattgatggaacctatctcaacataataagagttatttatgacaaatgcacagctaatatcatactgaatgggcaaaaactggaagcattccctttgaaaacctgcacaagacaagaacaccctttctccccactcctattcattatagtattggaagttctggcaatcagcaaaagaaagaaagaaataaagcgtattcagataggaagagaagaagtcaaattgtctttgtttgcagatgacatgattgtatatctagaaaaccctaccatctcagcccaaaatttccttaaactgataagcaacttcagcaaagtctcaggatacaaaatcaatgttcaaaaatcacaagcattcctatacgcaataataggcaaacagagagccaaatcatgtgttaactctcattcacaattgctacaaagggaataaaatacctaggaatccaacttaaaaatgatgtaaaggaccacttcaaggagaactacaaaccactgctcaaggaaatgaaagaggacacaaacaaacgaaaacaatccatgctcatggataggaagaatcaatattatgaaaatggccatattgcccaaagtaatttataaattcattgctatccccatcaagctcccattgactttcttcacagaattagaaaaaaaactacttcaaatttcatatggaatcaaaaaaggtcttgcatagacaagacaatactaagcaaaaagaacaaaggtggaggcatcatgctagctgtcttcaaactatactaaaaggccacagtaaccaagacaggatggtactcgtaccaaaacagatatattgacaaatggaacagaacagaggcctcagaaataacactcaacatctagaatcatctgatctttgatgaacctgacaaaaacaagtaatggggaaaggattccctatttaataaatggtgttggaaaactagctagccatatgcaaaaaactgaaactggacttcttccttactcgttatacaaaacataactgaagatggattaaagacttaaacataagacttaaaaccataaaaaccccagaagaaaaccaaggcagtaccattcaggacataggcatgggcaaagacttcatgactacaacaccaaaaacaatggcaacaaaagccaaaattgacaaacgagatataattaaactaaagagcttctgcacaacaaaaaaaactatatcagagtgaacaggcaacctaaagaatgggagaaaatttctgcaatctatccgtctgacaatgggctgatatgtagaatctacaaagaacttaaacaaatttacaagaaaaaaagaaacaacaacatcgaaaatgggcaaaggatttgaacagacacttctcaaaaggagacatttatgcagccaataaacaaatgaagaaaaggacatcatcactggttattagacacatgcaaatcaaaaacacaatgagaaaccatcccacacctgttagaatggtgatcattaaaaaaatcaggaaacaacaaaggatgtggaaaaataggaagacttatacactgttggtgagagtgtaaattagttcaaccagtgtggaagacagtgtggtgattcctcaaggatccacaatgagaaataccatttgacccagcaatcacattactgggtatatacccaaaggattataaattattctattataaagatacatgcatacgtatgtttattatggcactgttcacaagagcaaaaactttgaaacaaaccaaatgaccatcaatgatagactgaataaagaaaacttggcatgtccacatcatggaatacgatgcagtcataaaaaggatgagttcatgtcctttgcagggacatggatgaagctggaaaccaccattctcagcaaactaacacaagagtagaaaagctaacatcgcatgttctcactcataatagggagttaaacaaagagaacacacggacacaggaaggggaacatcacacactggagcctgtcgggaagtgggggactatgggagggatagcattagaagaaatattcctggcctaggccactattgcgattttctaaattttgtttcaaaaacatgatatgtttcaaaaattgttattggtatgtaattatataaatatatagttcagaaaaaagaatcaacattaattatgctttttccaaaatactttatggttttgagctcttctagcagtgacatttttgctgtaggtaattgctgtgtatctggtatattcatcatagcatactttgtgccgtttacacttatccttcaatttcccactctcctaagtgtaaaagttcaaggccagagctcccatatcttcccaatattactttttgaaaagaagcttctatgtactgttttctctgggtcttgattggatatattgctaaaagagctgaaaaataataatttttttaaaaattcggtgatgagattaaagtaaatatattttataaatctaatgtacaaaatgaggtcagctgagaagacaatgacagttgaagcagaacctgagatcctgtttctctccattgacatatgaacttaactacaattgggcgaacaaagccagttgagtttgtagcaccccacatgagaaaaaagccaaccataaccacatttagaagaaaatttggtcacatttgtgcactacagaacagcgcagttagataaaaatctgtccattccatgattctcctttgggaaagaaaaaagagtgaaatgcgtatgcaaacttctgacttactgagttataccggggttatctaaagactggaaattgcttcctttaacatttagtgttgatgagaatagagactgagtttaaatgacagcttgggtcaactgagaataaagataaatgcttcttacaacaacagagactgtagtgcctacaacagtgacgaagggaagagactaaaggctcctaagaggaaacagaggtaaaccttattaacaagaaaatacatacagtagtccaaagaagacacattttgacaacagattggagaagctcccagtatgactactgtggctgaatgttgtcaattttcccatgtataaagctctttcataaaggataaaataggtagtggtttcttaattgatcaaaaccttaacaaaactacagtaagtaaaagcaaccaggaaatataacctaatcaaaggagaaaaatatatattcaagtgaacctaaagaagtggagatctaggaattatttttttaacttaaaatctttttatttttctttactttttcattttatgcagaggatcttactttatctcctgggacagagtacactggtggaatcacagctcactgtaacctcaaatttcggaagtcaagcagtcatgccacctatgtctcctgagtaaatatgaccacagttgtgcacattacccctcctgtatagtttctttaaaaaaatttgtacaaacagtatgttgctgtgttgcctcggctggtctcaaactcctggtctcaggcaatccgactgcttcagtctgaaagtgctggcacaagctaccatacctggaattgtttctcttttaagaaaaaatagctttaaatcattaatagtaaaataaaacaaagaaaggtattgcgtaacgataaagggttcaattcaacaagaagacttaactatcgtaaatgtagatgcacccaactttggggaacatagagttatacaacaattactgctagaactacaataagcctcaagtagacacacaataatagtaggggaatgcaactccccactaagtgtttgacagattatctaggcagaaacttaacaaagaaattctggagtttgattcgacacttgatcaattgaaactaatagacatttatagtatatgcaacacatcatctaaagaaagtaaattcttctcatctgctcacagaatatgacaggccacaatggaacaaagataaaaatcaataccaagaaaatctcacaaaatcacagaatgatattgaaattaaacaacttgctcctgaatgaattttggataaacaaaaaaattaaggcagaaaattaaaaagattttgaaatagaagagacacaatataacaaaatgtctgggttgtaggaagagctctgttaagaggaaagttgagagtgctaaatacctgcatcaagaagttagaatgatctcaaactaacaatttaacatcacacttagagaaactagaaaaataaaaactaacttaccccaaagctagcagaatggcaaaaatattcataacctatgaacctgacaaaatctaatactcagaatctataagaaacttaaagaattcacaaggaaaaaattaccccatgaaaaagtgggcaataacagacactcttcaaaagaacacatacaagtggccaaataacatgaaaaaagcttatcatcactaaccatcaaggaaatgtaaataaaaaccacaataagacaccattgtacaccagttagaatggtttttgttaaaaagtaaaatgataatagatgttgatggggttttagagggaaaaaaccacttatacactgttaataggaatgtaaattagttcagccactgtggagaacagcttggagattttccaaataactgagagttaaactgtgattcaacccagcaatttcaccgctgggtatatacccaaaagagaataaactattctaccaaaatagcacatgcacttgttggttcatcactacactattcataagaggaaggacctgaatcaacctacgtgcctattcatggtaattttttatttttttgagatgacgtctcactctgttgcccaggctggagtgcagtggcacgatctcagctcactacaatctccacctcccaggttcaagcaattctccttcctcagccacccgagtagctgggactataggcgcatgccaccaagcctggctaacttttgtatttccagtacatacggggtttcattacgttgtccaggatggtctcgatctcctgacctcatgatccacccgccttggcctcccacagcactgggattacaggcatcagccaccatgtccagcctattgatggtaaattgaatttaaaaagtgtcacatgtacagcaatactacttagcaaaaacaaacaaaaaaaacctcctttgcagcaacgttaacacaactaaaggccattatacaaagcaaattaatgcagaaatggaaaatgaaaatactgcatattctcacttataaatggaaattaacactgggtacacatggacagaaaaacaaaaataatagacaactcttagagggtggagagagggagggaccaagaactgaaaaactgtctacttagtactatgctcactacctgattgatggaattactcatacttcaaacctcagcattatacaaaatacccatgtaaaaaacctgtgtaggtacctcctaaatctaaaataaatttgaaattctaaaaagaggtcttactctctcacccagacaggaatacaatacgatgattatagctcaatgcagcctcaagttcctggggaactcaaggaataatcttacgtcagcctccaacttcctgagactacaggaacattccacaatgcctgagtaatctgtgaaaatattttttaccaatagcttgtcacaatattgcccggggtagtgtcgaactcctggatttaagtaattgacagggtttggctctgtgtccccaatcaaatctcatcttaaattgtaataatccccacatgtcctgggagggaccctgtgggaggtaatatttttatcaaaatatcaatgacattttttcacagaaatagaaaaaatattttaaatttatgtggatccacaaaaaactctgaatagacaaataactttgagcaaaataagcaaagctaaaggcatcactttatcaaacttcaaaacttgctacaaagctatagtaaccaaaagagcactgtactggcataaaaacaaacacatagactaatgtgcccaagaagcccagaagttagtttatgcacctaaagccaactgattgtcaacaaaattgccaagaacacactttagggaaaagctaatttcttcaataaatgatgcagggccatttaaatatttaaattcagaaaaattatactagacccctgtgccttgccatatatgaaaatcaattcaaactaaagacttaaatgtaatgctatcaattatgaaactattagagaaaaactaaaaaatgctttataacattcgacggggaaaggattattaaaataacatgtcaaaacataggcaacaaaatcaaaaataagcaaacaacattatgtcaaactaaaatgcttttccatattaaaaaaactaaaagattgaagagacagcttaggcaataaaagaaaatgctttcaggctatacatatgacaaaaggctaatattcagaataaataagaaactttaaaatctcaaaataaaatacacttataatctaattaaaaaaatgcaaaagatcnnnnnnnnnnnnnnnnnnnnnnnnnnnnnnnnnnnnnnnnnnnnnnnnnnnnnnnnnnnnnnnnnnnnnnnnnnnnnnnnnnnnnnnnnnnnnnnnnnnnnnnnnnnnnnnnnnnnnnnnnnnnnnnnnnnnnnnnnnnnnnnnnnnnnnnnnnnnnnnnnnnnnnnnnnnnnnnnnnnnnnnnnnnnnnnnnnnnnnnnnnnnnnnnnnnnnnnnnnnnnnnnnnnnnnnnnnnnnnnnnnnnnnnnnnnnnnnnnnnnnnnnnnnnnnnnnnnnnnnnnnnnnnnnnnnnnnnnnnnnnnnnnnnnnnnnnnnnnnnnnnnnnnnnnnnnnnnnnnnnnnnnnnnnnnnnnnnnnnnnnnnnnnnnnnnnnnnnnnnnnnnnnnnnnnnnnnnnnnnnnnnnnnnnnnnnnnnnnnnnnnnnnnnnnnnnnnnnnnnnnnnnnnnnnnnnnnnnnnnnnnnnnnnnnnnnnnnnnnnnnnnnnnnnnnnnnnnnnnnnnnnnnnnnnnnnnnnnnnnnnnnnnnnnnnnnnnnnnnnnnnnnnnnnnnnnnnnnnnnnnnnnnnnnnnnnnnnnnnnnnnnnnnnnnnnnnnnnnnnnnnnnnnnnnnnnnnnnnnnnnnnnnnnnnnnnnnnnnnnnnnnnnnnnnnnnnnnnnnnnnnnnnnnnnnnnnnnnnnnnnnnnnnnnnnnnnnnnnnnnnnnnnnnnnnnnnnnnnnnnnnnnnnnnnnnnnnnnnnnnnnnnnnnnnnnnnnnnnnnnnnnnnnnnnnnnnnnnnnnnnnnnnnnnnnnnnnnnnnnnnnnnnnnnnnnnnnnnnnnnnnnnnnnnnnnnnnnnnnnnnnnnnnnnnnnnnnnnnnnnnnnnnnnnnnnnnnnnnnnnnnnnnnnnnnnnnnnnnnnnnnnnnnnnnnnnnnnnnnnnnnnnnnnnnnnnnnnnnnnnnnnnnnnnnnnnnnnnnnnnnnnnnnnnnnnnnnnnnnnnnnnnnnnnnnnnnnnnnnnnnnnnnnnnnnnnnnnnnnnnnnnnnnnnnnnnnnnnnnnnnnnnnnnnnnnnnnnnnnnnnnnnnnnnnnnnnnnnnnnnnnnnnnnnnnnnnnnnnnnnnnnnnnnnnnnnnnnnnnnnnnnnnnnnnnnnnnnnnnnnnnnnnnnnnnnnnnnnnnnnnnnnnnnnnnnnnnnnnnnnnnnnnnnnnnnnnnnnnnnnnnnnnnnnnnnnnnnnnnnnnnnnnnnnnnnnnnnnnnnnnnnnnnnnnnnnnnnnnnnnnnnnnnnnnnnnnnnnnnnnnnnnnnnnnnnnnnnnnnnnnnnnnnnnnnnnnnnnnnnnnnnnnnnnnnnnnnnnnnnnnnnnnnnnnnnnnnnnnnnnnnnnnnnnnnnnnnnnnnnnnnnnnnnnnnnnnnnnnnnnnnnnnnnnnnnnnnnnnnnnnnnnnnnnnnnnnnnnnnnnnnnnnnnnnnnnnnnnnnnnnnnnnnnnnnnnnnnnnnnnnnnnnnnnnnnnnnnnnnnnnnnnnnnnnnnnnnnnnnnnnnnnnnnnnnnnnnnnnnnnnnnnnnnnnnnnnnnnnnnnnnnnnnnnnnnnnnnnnnnnnnnnnnnnnnnnnnnnnnnnnnnnnnnnnnnnnnnnnnnnnnnnnnnnnnnnnnnnnnnnnnnnnnnnnnnnnnnnnnnnnnnnnnnnnnnnnnnnnnnnnnnnnnnnnnnnnnnnnnnnnnnnnnnnnnnnnnnnnnnnnnnnnnnnnnnnnnnnnnnnnnnnnnnnnnnnnnnnnnnnnnnnnnnnnnnnnnnnnnnnnnnnnnnnnnnnnnnnnnnnnnnnnnnnnnnnnnnnnnnnnnnnnnnnnnnnnnnnnnnnnnnnnnnnnnnnnnnnnnnnnnnnnnnnnnnnnnnnnnnnnnnnnnnnnnnnnnnnnnnnnnnnnnnnnnnnnnnnnnnnnnnnnnnnnnnnnnnnnnnnnnnnnnnnnnnnnnnnnnnnnnnnnnnnnnnnnnnnnnnnnnnnnnnnnnnnnnnnnnnnnnnnnnnnnnnnnnnnnnnnnnnnnnnnnnnnnnnnnnnnnnnnnnnnnnnnnnnnnnnnnnnnnnnnnnnnnnnnnnnnnnnnnnnnnnnnnnnnnnnnnnnnnnnnnnnnnnnnnnnnnnnnnnnnnnnnnnnnnnnnnnnnnnnnnnnnnnnnnnnnnnnnnnnnnnnnnnnnnnnnnnnnnnnnnnnnnnnnnnnnnnnnnnnnnnnnnnnnnnnnnnnnnnnnnnnnnnnnnnnnnnnnnnnnnnnnnnnnnnnnnnnnnnnnnnnnnnnnnnnnnnnnnnnnnnnnnnnnnnnnnnnnnnnnnnnnnnnnnnnnnnnnnnnnnnnnnnnnnnnnnnnnnnnnnnnnnnnnnnnnnnnnnnnnnnnnnnnnnnnnnnnnnnnnnnnnnnnnnnnnnnnnnnnnnnnnnnnnnnnnnnnnnnnnnnnnnnnnnnnnnnnnnnnnnnnnnnnnnnnnnnnnnnnnnnnnnnnnnnnnnnnnnnnnnnnnnnnnnnnnnnnnnnnnnnnnnnnnnnnnnnnnnnnnnnnnnnnnnnnnnnnnnnnnnnnnnnnnnnnnnnnnnnnnnnnnnnnnnnnnnnnnnnnnnnnnnnnnnnnnnnnnnnnnnnnnnnnnnnnnnnnnnnnnnnnnnnnnnnnnnnnnnnnnnnnnnnnnnnnnnnnnnnnnnnnnnnnnnnnnnnnnnnnnnnnnnnnnnnnnnnnnnnnnnnnnnnnnnnnnnnnnnnnnnnnnnnnnnnnnnnnnnnnnnnnnnnnnnnnnnnnnnnnnnnnnnnnnnnnnnnnnnnnnnnnnnnnnnnnnnnnnnnnnnnnnnnnnnnnnnnnnnnnnnnnnnnnnnnnnnnnnnnnnnnnnnnnnnnnnnnnnnnnnnnnnnnnnnnnnnnnnnnnnnnnnnnnnnnnnnnnnnnnnnnnnnnnnnnnnnnnnnnnnnnnnnnnnnnnnnnnnnnnnnnnnnnnnnnnnnnnnnnnnnnnnnnnnnnnnnnnnnnnnnnnnnnnnnnnnnnnnnnnnnnnnnnnnnnnnnnnnnnnnnnnnnnnnnnnnnnnnnnnnnnnnnnnnnnnnnnnnnnnnnnnnnnnnnnnnnnnnnnnnnnnnnnnnnnnnnnnnnnnnnnnnnnnnnnnnnnnnnnnnnnnnnnnnnnnnnnnnnnnnnnnnnnnnnnnnnnnnnnnnnnnnnnnnnnnnnnnnnnnnnnnnnnnnnnnnnnnnnnnnnnnnnnnnnnnnnnnnnnnnnnnnnnnnnnnnnnnnnnnnnnnnnnnnnnnnnnnnnnnnnnnnnnnnnnnnnnnnnnnnnnnnnnnnnnnnnnnnnnnnnnnnnnnnnnnnnnnnnnnnnnnnnnnnnnnnnnnnnnnnnnnnnnnnnnnnnnnnnnnnnnnnnnnnnnnnnnnnnnnnnnnnnnnnnnnnnnnnnnnnnnnnnnnnnnnnnnnnnnnnnnnnnnnnnnnnnnnnnnnnnnnnnnnnnnnnnnnnnnnnnnnnnnnnnnnnnnnnnnnnnnnnnnnnnnnnnnnnnnnnnnnnnnnnnnnnnnnnnnnnnnnnnnnnnnnnnnnnnnnnnnnnnnnnnnnnnnnnnnnnnnnnnnnnnnnnnnnnnnnnnnnnnnnnnnnnnnnnnnnnnnnnnnnnnnnnnnnnnnnnnnnnnnnnnnnnnnnnnnnnnnnnnnnnnnnnnnnnnnnnnnnnnnnnnnnnnnnnnnnnnnnnnnnnnnnnnnnnnnnnnnnnnnnnnnnnnnnnnnnnnnnnnnnnnnnnnnnnnnnnnnnnnnnnnnnnnnnnnnnnnnnnnnnnnnnnnnnnnnnnnnnnnnnnnnnnnnnnnnnnnnnnnnnnnnnnnnnnnnnnnnnnnnnnnnnnnnnnnnnnnnnnnnnnnnnnnnnnnnnnnnnnnnnnnnnnnnnnnnnnnnnnnnnnnnnnnnnnnnnnnnnnnnnnnnnnnnnnnnnnnnnnnnnnnnnnnnnnnnnnnnnnnnnnnnnnnnnnnnnnnnnnnnnnnnnnnnnnnnnnnnnnnnnnnnnnnnnnnnnnnnnnnnnnnnnnnnnnnnnnnnnnnnnnnnnnnnnnnnnnnnnnnnnnnnnnnnnnnnnnnnnnnnnnnnnnnnnnnnnnnnnnnnnnnnnnnnnnnnnnnnnnnnnnnnnnnnnnnnnnnnnnnnnnnnnnnnnnnnnnnnnnnnnnnnnnnnnnnnnnnnnnnnnnnnnnnnnnnnnnnnnnnnnnnnnnnnnnnnnnnnnnnnnnnnnnnnnnnnnnnnnnnnnnnnnnnnnnnnnnnnnnnnnnnnnnnnnnnnnnnnnnnnnnnnnnnnnnnnnnnnnnnnnnnnnnnnnnnnnnnnnnnnnnnnnnnnnnnnnnnnnnnnnnnnnnnnnnnnnnnnnnnnnnnnnnnnnnnnnnnnnnnnnnnnnnnnnnnnnnnnnnnnnnnnnnnnnnnnnnnnnnnnnnnnnnnnnnnnnnnnnnnnnnnnnnnnnnnnnnnnnnnnnnnnnnnnnnnnnnnnnnnnnnnnnnnnnnnnnnnnnnnnnnnnnnnnnnnnnnnnnnnnnnnnnnnnnnnnnnnnnnnnnnnnnnnnnnnnnnnnnnnnnnnnnnnnnnnnnnnnnnnnnnnnnnnnnnnnnnnnnnnnnnnnnnnnnnnnnnnnnnnnnnnnnnnnnnnnnnnnnnnnnnnnnnnnnnnnnnnnnnnnnnnnnnnnnnnnnnnnnnnnnnnnnnnnnnnnnnnnnnnnnnnnnnnnnnnnnnnnnnnnnnnnnnnnnnnnnnnnnnnnnnnnnnnnnnnnnnnnnnnnnnnnnnnnnnnnnnnnnnnnnnnnnnnnnnnnnnnnnnnnnnnnnnnnnnnnnnnnnnnnnnnnnnnnnnnnnnnnnnnnnnnnnnnnnnnnnnnnnnnnnnnnnnnnnnnnnnnnnnnnnnnnnnnnnnnnnnnnnnnnnnnnnnnnnnnnnnnnnnnnnnnnnnnnnnnnnnnnnnnnnnnnnnnnnnnnnnnnnnnnnnnnnnnnnnnnnnnnnnnnnnnnnnnnnnnnnnnnnnnnnnnnnnnnnnnnnnnnnnnnnnnnnnnnnnnnnnnnnnnnnnnnnnnnnnnnnnnnnnnnnnnnnnnnnnnnnnnnnnnnnnnnnnnnnnnnnnnnnnnnnnnnnnnnnnnnnnnnnnnnnnnnnnnnnnnnnnnnnnnnnnnnnnnnnnnnnnnnnnnnnnnnnnnnnnnnnnnnnnnnnnnnnnnnnnnnnnnnnnnnnnnnnnnnnnnnnnnnnnnnnnnnnnnnnnnnnnnnnnnnnnnnnnnnnnnnnnnnnnnnnnnnnnnnnnnnnnnnnnnnnnnnnnnnnnnnnnnnnnnnnnnnnnnnnnnnnnnnnnnnnnnnnnnnnnnnnnnnnnnnnnnnnnnnnnnnnnnnnnnnnnnnnnnnnnnnnnnnnnnnnnnnnnnnnnnnnnnnnnnnnnnnnnnnnnnnnnnnnnnnnnnnnnnnnnnnnnnnnnnnnnnnnnnnnnnnnnnnnnnnnnnnnnnnnnnnnnnnnnnnnnnnnnnnnnnnnnnnnnnnnnnnnnnnnnnnnnnnnnnnnnnnnnnnnnnnnnnnnnnnnnnnnnnnnnnnnnnnnnnnnnnnnnnnnnnnnnnnnnnnnnnnnnnnnnnnnnnnnnnnnnnnnnnnnnnnnnnnnnnnnnnnnnnnnnnnnnnnnnnnnnnnnnnnnnnnnnnnnnnnnnnnnnnnnnnnnnnnnnnnnnnnnnnnnnnnnnnnnnnnnnnnnnnnnnnnnnnnnnnnnnnnnnnnnnnnnnnnnnnnnnnnnnnnnnnnnnnnnnnnnnnnnnnnnnnnnnnnnnnnnnnnnnnnnnnnnnnnnnnnnnnnnnnnnnnnnnnnnnnnnnnnnnnnnnnnnnnnnnnnnnnnnnnnnnnnnnnnnnnnnnnnnnnnnnnnnnnnnnnnnnnnnnnnnnnnnnnnnnnnnnnnnnnnnnnnnnnnnnnnnnnnnnnnnnnnnnnnnnnnnnnnnnnnnnnnnnnnnnnnnnnnnnnnnnnnnnnnnnnnnnnnnnnnnnnnnnnnnnnnnnnnnnnnnnnnnnnnnnnnnnnnnnnnnnnnnnnnnnnnnnnnnnnnnnnnnnnnnnnnnnnnnnnnnnnnnnnnnnnnnnnnnnnnnnnnnnnnnnnnnnnnnnnnnnnnnnnnnnnnnnnnnnnnnnnnnnnnnnnnnnnnnnnnnnnnnnnnnnnnnnnnnnnnnnnnnnnnnnnnnnnnnnnnnnnnnnnnnnnnnnnnnnnnnnnnnnnnnnnnnnnnnnnnnnnnnnnnnnnnnnnnnnnnnnnnnnnnnnnnnnnnnnnnnnnnnnnnnnnnnnnnnnnnnnnnnnnnnnnnnnnnnnnnnnnnnnnnnnnnnnnnnnnnnnnnnnnnnnnnnnnnnnnnnnnnnnnnnnnnnnnnnnnnnnnnnnnnnnnnnnnnnnnnnnnnnnnnnnnnnnnnnnnnnnnnnnnnnnnnnnnnnnnnnnnnnnnnnnnnnnnnnnnnnnnnnnnnnnnnnnnnnnnnnnnnnnnnnnnnnnnnnnnnnnnnnnnnnnnnnnnnnnnnnnnnnnnnnnnnnnnnnnnnnnnnnnnnnnnnnnnnnnnnnnnnnnnnnnnnnnnnnnnnnnnnnnnnnnnnnnnnnnnnnnnnnnnnnnnnnnnnnnnnnnnnnnnnnnnnnnnnnnnnnnnnnnnnnnnnnnnnnnnnnnnnnnnnnnnnnnnnnnnnnnnnnnnnnnnnnnnnnnnnnnnnnnnnnnnnnnnnnnnnnnnnnnnnnnnnnnnnnnnnnnnnnnnnnnnnnnnnnnnnnnnnnnnnnnnnnnnnnnnnnnnnnnnnnnnnnnnnnnnnnnnnnnnnnnnnnnnnnnnnnnnnnnnnnnnnnnnnnnnnnnnnnnnnnnnnnnnnnnnnnnnnnnnnnnnnnnnnnnnnnnnnnnnnnnnnnnnnnnnnnnnnnnnnnnnnnnnnnnnnnnnnnnnnnnnnnnnnnnnnnnnnnnnnnnnnnnnnnnnnnnnnnnnnnnnnnnnnnnnnnnnnnnnnnnnnnnnnnnnnnnnnnnnnnnnnnnnnnnnnnnnnnnnnnnnnnnnnnnnnnnnnnnnnnnnnnnnnnnnnnnnnnnnnnnnnnnnnnnnnnnnnnnnnnnnnnnnnnnnnnnnnnnnnnnnnnnnnnnnnnnnnnnnnnnnnnnnnnnnnnnnnnnnnnnnnnnnnnnnnnnnnnnnnnnnnnnnnnnnnnnnnnnnnnnnnnnnnnnnnnnnnnnnnnnnnnnnnnnnnnnnnnnnnnnnnnnnnnnnnnnnnnnnnnnnnnnnnnnnnnnnnnnnnnnnnnnnnnnnnnnnnnnnnnnnnnnnnnnnnnnnnnnnnnnnnnnnnnnnnnnnnnnnnnnnnnnnnnnnnnnnnnnnnnnnnnnnnnnnnnnnnnnnnnnnnnnnnnnnnnnnnnnnnnnnnnnnnnnnnnnnnnnnnnnnnnnnnnnnnnnnnnnnnnnnnnnnnnnnnnnnnnnnnnnnnnnnnnnnnnnnnnnnnnnnnnnnnnnnnnnnnnnnnnnnnnnnnnnnnnnnnnnnnnnnnnnnnnnnnnnnnnnnnnnnnnnnnnnnnnnnnnnnnnnnnnnnnnnnnnnnnnnnnnnnnnnnnnnnnnnnnnnnnnnnnnnnnnnnnnnnnnnnnnnnnnnnnnnnnnnnnnnnnnnnnnnnnnnnnnnnnnnnnnnnnnnnnnnnnnnnnnnnnnnnnnnnnnnnnnnnnnnnnnnnnnnnnnnnnnnnnnnnnnnnnnnnnnnnnnnnnnnnnnnnnnnnnnnnnnnnnnnnnnnnnnnnnnnnnnnnnnnnnnnnnnnnnnnnnnnnnnnnnnnnnnnnnnnnnnnnnnnnnnnnnnnnnnnnnnnnnnnnnnnnnnnnnnnnnnnnnnnnnnnnnnnnnnnnnnnnnnnnnnnnnnnnnnnnnnnnnnnnnnnnnnnnnnnnnnnnnnnnnnnnnnnnnnnnnnnnnnnnnnnnnnnnnnnnnnnnnnnnnnnnnnnnnnnnnnnnnnnnnnnnnnnnnnnnnnnnnnnnnnnnnnnnnnnnnnnnnnnnnnnnnnnnnnnnnnnnnnnnnnnnnnnnnnnnnnnnnnnnnnnnnnnnnnnnnnnnnnnnnnnnnnnnnnnnnnnnnnnnnnnnnnnnnnnnnnnnnnnnnnnnnnnnnnnnnnnnnnnnnnnnnnnnnnnnnnnnnnnnnnnnnnnnnnnnnnnnnnnnnnnnnnnnnnnnnnnnnnnnnnnnnnnnnnnnnnnnnnnnnnnnnnnnnnnnnnnnnnnnnnnnnnnnnnnnnnnnnnnnnnnnnnnnnnnnnnnnnnnnnnnnnnnnnnnnnnnnnnnnnnnnnnnnnnnnnnnnnnnnnnnnnnnnnnnnnnnnnnnnnnnnnnnnnnnnnnnnnnnnnnnnnnnnnnnnnnnnnnnnnnnnnnnnnnnnnnnnnnnnnnnnnnnnnnnnnnnnnnnnnnnnnnnnnnnnnnnnnnnnnnnnnnnnnnnnnnnnnnnnnnnnnnnnnnnnnnnnnnnnnnnnnnnnnnnnnnnnnnnnnnnnnnnnnnnnnnnnnnnnnnnnnnnnnnnnnnnnnnnnnnnnnnnnnnnnnnnnnnnnnnnnnnnnnnnnnnnnnnnnnnnnnnnnnnnnnnnnnnnnnnnnnnnnnnnnnnnnnnnnnnnnnnnnnnnnnnnnnnnnnnnnnnnnnnnnnnnnnnnnnnnnnnnnnnnnnnnnnnnnnnnnnnnnnnnnnnnnnnnnnnnnnnnnnnnnnnnnnnnnnnnnnnnnnnnnnnnnnnnnnnnnnnnnnnnnnnnnnnnnnnnnnnnnnnnnnnnnnnnnnnnnnnnnnnnnnnnnnnnnnnnnnnnnnnnnnnnnnnnnnnnnnnnnnnnnnnnnnnnnnnnnnnnnnnnnnnnnnnnnnnnnnnnnnnnnnnnnnnnnnnnnnnnnnnnnnnnnnnnnnnnnnnnnnnnnnnnnnnnnnnnnnnnnnnnnnnnnnnnnnnnnnnnnnnnnnnnnnnnnnnnnnnnnnnnnnnnnnnnnnnnnnnnnnnnnnnnnnnnnnnnnnnnnnnnnnnnnnnnnnnnnnnnnnnnnnnnnnnnnnnnnnnnnnnnnnnnnnnnnnnnnnnnnnnnnnnnnnnnnnnnnnnnnnnnnnnnnnnnnnnnnnnnnnnnnnnnnnnnnnnnnnnnnnnnnnnnnnnnnnnnnnnnnnnnnnnnnnnnnnnnnnnnnnnnnnnnnnnnnnnnnnnnnnnnnnnnnnnnnnnnnnnnnnnnnnnnnnnnnnnnnnnnnnnnnnnnnnnnnnnnnnnnnnnnnnnnnnnnnnnnnnnnnnnnnnnnnnnnnnnnnnnnnnnnnnnnnnnnnnnnnnnnnnnnnnnnnnnnnnnnnnnnnnnnnnnnnnnnnnnnnnnnnnnnnnnnnnnnnnnnnnnnnnnnnnnnnnnnnnnnnnnnnnnnnnnnnnnnnnnnnnnnnnnnnnnnnnnnnnnnnnnnnnnnnnnnnnnnnnnnnnnnnnnnnnnnnnnnnnnnnnnnnnnnnnnnnnnnnnnnnnnnnnnnnnnnnnnnnnnnnnnnnnnnnnnnnnnnnnnnnnnnnnnnnnnnnnnnnnnnnnnnnnnnnnnnnnnnnnnnnnnnnnnnnnnnnnnnnnnnnnnnnnnnnnnnnnnnnnnnnnnnnnnnnnnnnnnnnnnnnnnnnnnnnnnnnnnnnnnnnnnnnnnnnnnnnnnnnnnnnnnnnnnnnnnnnnnnnnnnnnnnnnnnnnnnnnnnnnnnnnnnnnnnnnnnnnnnnnnnnnnnnnnnnnnnnnnnnnnnnnnnnnnnnnnnnnnnnnnnnnnnnnnnnnnnnnnnnnnnnnnnnnnnnnnnnnnnnnnnnnnnnnnnnnnnnnnnnnnnnnnnnnnnnnnnnnnnnnnnnnnnnnnnnnnnnnnnnnnnnnnnnnnnnnnnnnnnnnnnnnnnnnnnnnnnnnnnnnnnnnnnnnnnnnnnnnnnnnnnnnnnnnnnnnnnnnnnnnnnnnnnnnnnnnnnnnnnnnnnnnnnnnnnnnnnnnnnnnnnnnnnnnnnnnnnnnnnnnnnnnnnnnnnnnnnnnnnnnnnnnnnnnnnnnnnnnnnnnnnnnnnnnnnnnnnnnnnnnnnnnnnnnnnnnnnnnnnnnnnnnnnnnnnnnnnnnnnnnnnnnnnnnnnnnnnnnnnnnnnnnnnnnnnnnnnnnnnnnnnnnnnnnnnnnnnnnnnnnnnnnnnnnnnnnnnnnnnnnnnnnnnnnnnnnnnnnnnnnnnnnnnnnnnnnnnnnnnnnnnnnnnnnnnnnnnnnnnnnnnnnnnnnnnnnnnnnnnnnnnnnnnnnnnnnnnnnnnnnnnnnnnnnnnnnnnnnnnnnnnnnnnnnnnnnnnnnnnnnnnnnnnnnnnnnnnnnnnnnnnnnnnnnnnnnnnnnnnnnnnnnnnnnnnnnnnnnnnnnnnnnnnnnnnnnnnnnnnnnnnnnnnnnnnnnnnnnnnnnnnnnnnnnnnnnnnnnnnnnnnnnnnnnnnnnnnnnnnnnnnnnnnnnnnnnnnnnnnnnnnnnnnnnnnnnnnnnnnnnnnnnnnnnnnnnnnnnnnnnnnnnnnnnnnnnnnnnnnnnnnnnnnnnnnnnnnnnnnnnnnnnnnnnnnnnnnnnnnnnnnnnnnnnnnnnnnnnnnnnnnnnnnnnnnnnnnnnnnnnnnnnnnnnnnnnnnnnnnnnnnnnnnnnnnnnnnnnnnnnnnnnnnnnnnnnnnnnnnnnnnnnnnnnnnnnnnnnnnnnnnnnnnnnnnnnnnnnnnnnnnnnnnnnnnnnnnnnnnnnnnnnnnnnnnnnnnnnnnnnnnnnnnnnnnnnnnnnnnnnnnnnnnnnnnnnnnnnnnnnnnnnnnnnnnnnnnnnnnnnnnnnnnnnnnnnnnnnnnnnnnnnnnnnnnnnnnnnnnnnnnnnnnnnnnnnnnnnnnnnnnnnnnnnnnnnnnnnnnnnnnnnnnnnnnnnnnnnnnnnnnnnnnnnnnnnnnnnnnnnnnnnnnnnnnnnnnnnnnnnnnnnnnnnnnnnnnnnnnnnnnnnnnnnnnnnnnnnnnnnnnnnnnnnnnnnnnnnnnnnnnnnnnnnnnnnnnnnnnnnnnnnnnnnnnnnnnnnnnnnnnnnnnnnnnnnnnnnnnnnnnnnnnnnnnnnnnnnnnnnnnnnnnnnnnnnnnnnnnnnnnnnnnnnnnnnnnnnnnnnnnnnnnnnnnnnnnnnnnnnnnnnnnnnnnnnnnnnnnnnnnnnnnnnnnnnnnnnnnnnnnnnnnnnnnnnnnnnnnnnnnnnnnnnnnnnnnnnnnnnnnnnnnnnnnnnnnnnnnnnnnnnnnnnnnnnnnnnnnnnnnnnnnnnnnnnnnnnnnnnnnnnnnnnnnnnnnnnnnnnnnnnnnnnnnnnnnnnnnnnnnnnnnnnnnnnnnnnnnnnnnnnnnnnnnnnnnnnnnnnnnnnnnnnnnnnnnnnnnnnnnnnnnnnnnnnnnnnnnnnnnnnnnnnnnnnnnnnnnnnnnnnnnnnnnnnnnnnnnnnnnnnnnnnnnnnnnnnnnnnnnnnnnnnnnnnnnnnnnnnnnnnnnnnnnnnnnnnnnnnnnnnnnnnnnnnnnnnnnnnnnnnnnnnnnnnnnnnnnnnnnnnnnnnnnnnnnnnnnnnnnnnnnnnnnnnnnnnnnnnnnnnnnnnnnnnnnnnnnnnnnnnnnnnnnnnnnnnnnnnnnnnnnnnnnnnnnnnnnnnnnnnnnnnnnnnnnnnnnnnnnnnnnnnnnnnnnnnnnnnnnnnnnnnnnnnnnnnnnnnnnnnnnnnnnnnnnnnnnnnnnnnnnnnnnnnnnnnnnnnnnnnnnnnnnnnnnnnnnnnnnnnnnnnnnnnnnnnnnnnnnnnnnnnnnnnnnnnnnnnnnnnnnnnnnnnnnnnnnnnnnnnnnnnnnnnnnnnnnnnnnnnnnnnnnnnnnnnnnnnnnnnnnnnnnnnnnnnnnnnnnnnnnnnnnnnnnnnnnnnnnnnnnnnnnnnnnnnnnnnnnnnnnnnnnnnnnnnnnnnnnnnnnnnnnnnnnnnnnnnnnnnnnnnnnnnnnnnnnnnnnnnnnnnnnnnnnnnnnnnnnnnnnnnnnnnnnnnnnnnnnnnnnnnnnnnnnnnnnnnnnnnnnnnnnnnnnnnnnnnnnnnnnnnnnnnnnnnnnnnnnnnnnnnnnnnnnnnnnnnnnnnnnnnnnnnnnnnnnnnnnnnnnnnnnnnnnnnnnnnnnnnnnnnnnnnnnnnnnnnnnnnnnnnnnnnnnnnnnnnnnnnnnnnnnnnnnnnnnnnnnnnnnnnnnnnnnnnnnnnnnnnnnnnnnnnnnnnnnnnnnnnnnnnnnnnnnnnnnnnnnnnnnnnnnnnnnnnnnnnnnnnnnnnnnnnnnnnnnnnnnnnnnnnnnnnnnnnnnnnnnnnnnnnnnnnnnnnnnnnnnnnnnnnnnnnnnnnnnnnnnnnnnnnnnnnnnnnnnnnnnnnnnnnnnnnnnnnnnnnnnnnnnnnnnnnnnnnnnnnnnnnnnnnnnnnnnnnnnnnnnnnnnnnnnnnnnnnnnnnnnnnnnnnnnnnnnnnnnnnnnnnnnnnnnnnnnnnnnnnnnnnnnnnnnnnnnnnnnnnnnnnnnnnnnnnnnnnnnnnnnnnnnnnnnnnnnnnnnnnnnnnnnnnnnnnnnnnnnnnnnnnnnnnnnnnnnnnnnnnnnnnnnnnnnnnnnnnnnnnnnnnnnnnnnnnnnnnnnnnnnnnnnnnnnnnnnnnnnnnnnnnnnnnnnnnnnnnnnnnnnnnnnnnnnnnnnnnnnnnnnnnnnnnnnnnnnnnnnnnnnnnnnnnnnnnnnnnnnnnnnnnnnnnnnnnnnnnnnnnnnnnnnnnnnnnnnnnnnnnnnnnnnnnnnnnnnnnnnnnnnnnnnnnnnnnnnnnnnnnnnnnnnnnnnnnnnnnnnnnnnnnnnnnnnnnnnnnnnnnnnnnnnnnnnnnnnnnnnnnnnnnnnnnnnnnnnnnnnnnnnnnnnnnnnnnnnnnnnnnnnnnnnnnnnnnnnnnnnnnnnnnnnnnnnnnnnnnnnnnnnnnnnnnnnnnnnnnnnnnnnnnnnnnnnnnnnnnnnnnnnnnnnnnnnnnnnnnnnnnnnnnnnnnnnnnnnnnnnnnnnnnnnnnnnnnnnnnnnnnnnnnnnnnnnnnnnnnnnnnnnnnnnnnnnnnnnnnnnnnnnnnnnnnnnnnnnnnnnnnnnnnnnnnnnnnnnnnnnnnnnnnnnnnnnnnnnnnnnnnnnnnnnnnnnnnnnnnnnnnnnnnnnnnnnnnnnnnnnnnnnnnnnnnnnnnnnnnnnnnnnnnnnnnnnnnnnnnnnnnnnnnnnnnnnnnnnnnnnnnnnnnnnnnnnnnnnnnnnnnnnnnnnnnnnnnnnnnnnnnnnnnnnnnnnnnnnnnnnnnnnnnnnnnnnnnnnnnnnnnnnnnnnnnnnnnnnnnnnnnnnnnnnnnnnnnnnnnnnnnnnnnnnnnnnnnnnnnnnnnnnnnnnnnnnnnnnnnnnnnnnnnnnnnnnnnnnnnnnnnnnnnnnnnnnnnnnnnnnnnnnnnnnnnnnnnnnnnnnnnnnnnnnnnnnnnnnnnnnnnnnnnnnnnnnnnnnnnnnnnnnnnnnnnnnnnnnnnnnnnnnnnnnnnnnnnnnnnnnnnnnnnnnnnnnnnnnnnnnnnnnnnnnnnnnnnnnnnnnnnnnnnnnnnnnnnnnnnnnnnnnnnnnnnnnnnnnnnnnnnnnnnnnnnnnnnnnnnnnnnnnnnnnnnnnnnnnnnnnnnnnnnnnnnnnnnnnnnnnnnnnnnnnnnnnnnnnnnnnnnnnnnnnnnnnnnnnnnnnnnnnnnnnnnnnnnnnnnnnnnnnnnnnnnnnnnnnnnnnnnnnnnnnnnnnnnnnnnnnnnnnnnnnnnnnnnnnnnnnnnnnnnnnnnnnnnnnnnnnnnnnnnnnnnnnnnnnnnnnnnnnnnnnnnnnnnnnnnnnnnnnnnnnnnnnnnnnnnnnnnnnnnnnnnnnnnnnnnnnnnnnnnnnnnnnnnnnnnnnnnnnnnnnnnnnnnnnnnnnnnnnnnnnnnnnnnnnnnnnnnnnnnnnnnnnnnnnnnnnnnnnnnnnnnnnnnnnnnnnnnnnnnnnnnnnnnnnnnnnnnnnnnnnnnnnnnnnnnnnnnnnnnnnnnnnnnnnnnnnnnnnnnnnnnnnnnnnnnnnnnnnnnnnnnnnnnnnnnnnnnnnnnnnnnnnnnnnnnnnnnnnnnnnnnnnnnnnnnnnnnnnnnnnnnnnnnnnnnnnnnnnnnnnnnnnnnnnnnnnnnnnnnnnnnnnnnnnnnnnnnnnnnnnnnnnnnnnnnnnnnnnnnnnnnnnnnnnnnnnnnnnnnnnnnnnnnnnnnnnnnnnnnnnnnnnnnnnnnnnnnnnnnnnnnnnnnnnnnnnnnnnnnnnnnnnnnnnnnnnnnnnnnnnnnnnnnnnnnnnnnnnnnnnnnnnnnnnnnnnnnnnnnnnnnnnnnnnnnnnnnnnnnnnnnnnnnnnnnnnnnnnnnnnnnnnnnnnnnnnnnnnnnnnnnnnnnnnnnnnnnnnnnnnnnnnnnnnnnnnnnnnnnnnnnnnnnnnnnnnnnnnnnnnnnnnnnnnnnnnnnnnnnnnnnnnnnnnnnnnnnnnnnnnnnnnnnnnnnnnnnnnnnnnnnnnnnnnnnnnnnnnnnnnnnnnnnnnnnnnnnnnnnnnnnnnnnnnnnnnnnnnnnnnnnnnnnnnnnnnnnnnnnnnnnnnnnnnnnnnnnnnnnnnnnnnnnnnnnnnnnnnnnnnnnnnnnnnnnnnnnnnnnnnnnnnnnnnnnnnnnnnnnnnnnnnnnnnnnnnnnnnnnnnnnnnnnnnnnnnnnnnnnnnnnnnnnnnnnnnnnnnnnnnnnnnnnnnnnnnnnnnnnnnnnnnnnnnnnnnnnnnnnnnnnnnnnnnnnnnnnnnnnnnnnnnnnnnnnnnnnnnnnnnnnnnnnnnnnnnnnnnnnnnnnnnnnnnnnnnnnnnnnnnnnnnnnnnnnnnnnnnnnnnnnnnnnnnnnnnnnnnnnnnnnnnnnnnnnnnnnnnnnnnnnnnnnnnnnnnnnnnnnnnnnnnnnnnnnnnnnnnnnnnnnnnnnnnnnnnnnnnnnnnnnnnnnnnnnnnnnnnnnnnnnnnnnnnnnnnnnnnnnnnnnnnnnnnnnnnnnnnnnnnnnnnnnnnnnnnnnnnnnnnnnnnnnnnnnnnnnnnnnnnnnnnnnnnnnnnnnnnnnnnnnnnnnnnnnnnnnnnnnnnnnnnnnnnnnnnnnnnnnnnnnnnnnnnnnnnnnnnnnnnnnnnnnnnnnnnnnnnnnnnnnnnnnnnnnnnnnnnnnnnnnnnnnnnnnnnnnnnnnnnnnnnnnnnnnnnnnnnnnnnnnnnnnnnnnnnnnnnnnnnnnnnnnnnnnnnnnnnnnnnnnnnnnnnnnnnnnnnnnnnnnnnnnnnnnnnnnnnnnnnnnnnnnnnnnnnnnnnnnnnnnnnnnnnnnnnnnnnnnnnnnnnnnnnnnnnnnnnnnnnnnnnnnnnnnnnnnnnnnnnnnnnnnnnnnnnnnnnnnnnnnnnnnnnnnnnnnnnnnnnnnnnnnnnnnnnnnnnnnnnnnnnnnnnnnnnnnnnnnnnnnnnnnnnnnnnnnnnnnnnnnnnnnnnnnnnnnnnnnnnnnnnnnnnnnnnnnnnnnnnnnnnnnnnnnnnnnnnnnnnnnnnnnnnnnnnnnnnnnnnnnnnnnnnnnnnnnnnnnnnnnnnnnnnnnnnnnnnnnnnnnnnnnnnnnnnnnnnnnnnnnnnnnnnnnnnnnnnnnnnnnnnnnnnnnnnnnnnnnnnnnnnnnnnnnnnnnnnnnnnnnnnnnnnnnnnnnnnnnnnnnnnnnnnnnnnnnnnnnnnnnnnnnnnnnnnnnnnnnnnnnnnnnnnnnnnnnnnnnnnnnnnnnnnnnnnnnnnnnnnnnnnnnnnnnnnnnnnnnnnnnnnnnnnnnnnnnnnnnnnnnnnnnnnnnnnnnnnnnnnnnnnnnnnnnnnnnnnnnnnnnnnnnnnnnnnnnnnnnnnnnnnnnnnnnnnnnnnnnnnnnnnnnnnnnnnnnnnnnnnnnnnnnnnnnnnnnnnnnnnnnnnnnnnnnnnnnnnnnnnnnnnnnnnnnnnnnnnnnnnnnnnnnnnnnnnnnnnnnnnnnnnnnnnnnnnnnnnnnnnnnnnnnnnnnnnnnnnnnnnnnnnnnnnnnnnnnnnnnnnnnnnnnnnnnnnnnnnnnnnnnnnnnnnnnnnnnnnnnnnnnnnnnnnnnnnnnnnnnnnnnnnnnnnnnnnnnnnnnnnnnnnnnnnnnnnnnnnnnnnnnnnnnnnnnnnnnnnnnnnnnnnnnnnnnnnnnnnnnnnnnnnnnnnnnnnnnnnnnnnnnnnnnnnnnnnnnnnnnnnnnnnnnnnnnnnnnnnnnnnnnnnnnnnnnnnnnnnnnnnnnnnnnnnnnnnnnnnnnnnnnnnnnnnnnnnnnnnnnnnnnnnnnnnnnnnnnnnnnnnnnnnnnnnnnnnnnnnnnnnnnnnnnnnnnnnnnnnnnnnnnnnnnnnnnnnnnnnnnnnnnnnnnnnnnnnnnnnnnnnnnnnnnnnnnnnnnnnnnnnnnnnnnnnnnnnnnnnnnnnnnnnnnnnnnnnnnnnnnnnnnnnnnnnnnnnnnnnnnnnnnnnnnnnnnnnnnnnnnnnnnnnnnnnnnnnnnnnnnnnnnnnnnnnnnnnnnnnnnnnnnnnnnnnnnnnnnnnnnnnnnnnnnnnnnnnnnnnnnnnnnnnnnnnnnnnnnnnnnnnnnnnnnnnnnnnnnnnnnnnnnnnnnnnnnnnnnnnnnnnnnnnnnnnnnnnnnnnnnnnnnnnnnnnnnnnnnnnnnnnnnnnnnnnnnnnnnnnnnnnnnnnnnnnnnnnnnnnnnnnnnnnnnnnnnnnnnnnnnnnnnnnnnnnnnnnnnnnnnnnnnnnnnnnnnnnnnnnnnnnnnnnnnnnnnnnnnnnnnnnnnnnnnnnnnnnnnnnnnnnnnnnnnnnnnnnnnnnnnnnnnnnnnnnnnnnnnnnnnnnnnnnnnnnnnnnnnnnnnnnnnnnnnnnnnnnnnnnnnnnnnnnnnnnnnnnnnnnnnnnnnnnnnnnnnnnnnnnnnnnnnnnnnnnnnnnnnnnnnnnnnnnnnnnnnnnnnnnnnnnnnnnnnnnnnnnnnnnnnnnnnnnnnnnnnnnnnnnnnnnnnnnnnnnnnnnnnnnnnnnnnnnnnnnnnnnnnnnnnnnnnnnnnnnnnnnnnnnnnnnnnnnnnnnnnnnnnnnnnnnnnnnnnnnnnnnnnnnnnnnnnnnnnnnnnnnnnnnnnnnnnnnnnnnnnnnnnnnnnnnnnnnnnnnnnnnnnnnnnnnnnnnnnnnnnnnnnnnnnnnnnnnnnnnnnnnnnnnnnnnnnnnnnnnnnnnnnnnnnnnnnnnnnnnnnnnnnnnnnnnnnnnnnnnnnnnnnnnnnnnnnnnnnnnnnnnnnnnnnnnnnnnnnnnnnnnnnnnnnnnnnnnnnnnnnnnnnnnnnnnnnnnnnnnnnnnnnnnnnnnnnnnnnnnnnnnnnnnnnnnnnnnnnnnnnnnnnnnnnnnnnnnnnnnnnnnnnnnnnnnnnnnnnnnnnnnnnnnnnnnnnnnnnnnnnnnnnnnnnnnnnnnnnnnnnnnnnnnnnnnnnnnnnnnnnnnnnnnnnnnnnnnnnnnnnnnnnnnnnnnnnnnnnnnnnnnnnnnnnnnnnnnnnnnnnnnnnnnnnnnnnnnnnnnnnnnnnnnnnnnnnnnnnnnnnnnnnnnnnnnnnnnnnnnnnnnnnnnnnnnnnnnnnnnnnnnnnnnnnnnnnnnnnnnnnnnnnnnnnnnnnnnnnnnnnnnnnnnnnnnnnnnnnnnnnnnnnnnnnnnnnnnnnnnnnnnnnnnnnnnnnnnnnnnnnnnnnnnnnnnnnnnnnnnnnnnnnnnnnnnnnnnnnnnnnnnnnnnnnnnnnnnnnnnnnnnnnnnnnnnnnnnnnnnnnnnnnnnnnnnnnnnnnnnnnnnnnnnnnnnnnnnnnnnnnnnnnnnnnnnnnnnnnnnnnnnnnnnnnnnnnnnnnnnnnnnnnnnnnnnnnnnnnnnnnnnnnnnnnnnnnnnnnnnnnnnnnnnnnnnnnnnnnnnnnnnnnnnnnnnnnnnnnnnnnnnnnnnnnnnnnnnnnnnnnnnnnnnnnnnnnnnnnnnnnnnnnnnnnnnnnnnnnnnnnnnnnnnnnnnnnnnnnnnnnnnnnnnnnnnnnnnnnnnnnnnnnnnnnnnnnnnnnnnnnnnnnnnnnnnnnnnnnnnnnnnnnnnnnnnnnnnnnnnnnnnnnnnnnnnnnnnnnnnnnnnnnnnnnnnnnnnnnnnnnnnnnnnnnnnnnnnnnnnnnnnnnnnnnnnnnnnnnnnnnnnnnnnnnnnnnnnnnnnnnnnnnnnnnnnnnnnnnnnnnnnnnnnnnnnnnnnnnnnnnnnnnnnnnnnnnnnnnnnnnnnnnnnnnnnnnnnnnnnnnnnnnnnnnnnnnnnnnnnnnnnnnnnnnnnnnnnnnnnnnnnnnnnnnnnnnnnnnnnnnnnnnnnnnnnnnnnnnnnnnnnnnnnnnnnnnnnnnnnnnnnnnnnnnnnnnnnnnnnnnnnnnnnnnnnnnnnnnnnnnnnnnnnnnnnnnnnnnnnnnnnnnnnnnnnnnnnnnnnnnnnnnnnnnnnnnnnnnnnnnnnnnnnnnnnnnnnnnnnnnnnnnnnnnnnnnnnnnnnnnnnnnnnnnnnnnnnnnnnnnnnnnnnnnnnnnnnnnnnnnnnnnnnnnnnnnnnnnnnnnnnnnnnnnnnnnnnnnnnnnnnnnnnnnnnnnnnnnnnnnnnnnnnnnnnnnnnnnnnnnnnnnnnnnnnnnnnnnnnnnnnnnnnnnnnnnnnnnnnnnnnnnnnnnnnnnnnnnnnnnnnnnnnnnnnnnnnnnnnnnnnnnnnnnnnnnnnnnnnnnnnnnnnnnnnnnnnnnnnnnnnnnnnnnnnnnnnnnnnnnnnnnnnnnnnnnnnnnnnnnnnnnnnnnnnnnnnnnnnnnnnnnnnnnnnnnnnnnnnnnnnnnnnnnnnnnnnnnnnnnnnnnnnnnnnnnnnnnnnnnnnnnnnnnnnnnnnnnnnnnnnnnnnnnnnnnnnnnnnnnnnnnnnnnnnnnnnnnnnnnnnnnnnnnnnnnnnnnnnnnnnnnnnnnnnnnnnnnnnnnnnnnnnnnnnnnnnnnnnnnnnnnnnnnnnnnnnnnnnnnnnnnnnnnnnnnnnnnnnnnnnnnnnnnnnnnnnnnnnnnnnnnnnnnnnnnnnnnnnnnnnnnnnnnnnnnnnnnnnnnnnnnnnnnnnnnnnnnnnnnnnnnnnnnnnnnnnnnnnnnnnnnnnnnnnnnnnnnnnnnnnnnnnnnnnnnnnnnnnnnnnnnnnnnnnnnnnnnnnnnnnnnnnnnnnnnnnnnnnnnnnnnnnnnnnnnnnnnnnnnnnnnnnnnnnnnnnnnnnnnnnnnnnnnnnnnnnnnnnnnnnnnnnnnnnnnnnnnnnnnnnnnnnnnnnnnnnnnnnnnnnnnnnnnnnnnnnnnnnnnnnnnnnnnnnnnnnnnnnnnnnnnnnnnnnnnnnnnnnnnnnnnnnnnnnnnnnnnnnnnnnnnnnnnnnnnnnnnnnnnnnnnnnnnnnnnnnnnnnnnnnnnnnnnnnnnnnnnnnnnnnnnnnnnnnnnnnnnnnnnnnnnnnnnnnnnnnnnnnnnnnnnnnnnnnnnnnnnnnnnnnnnnnnnnnnnnnnnnnnnnnnnnnnnnnnnnnnnnnnnnnnnnnnnnnnnnnnnnnnnnnnnnnnnnnnnnnnnnnnnnnnnnnnnnnnnnnnnnnnnnnnnnnnnnnnnnnnnnnnnnnnnnnnnnnnnnnnnnnnnnnnnnnnnnnnnnnnnnnnnnnnnnnnnnnnnnnnnnnnnnnnnnnnnnnnnnnnnnnnnnnnnnnnnnnnnnnnnnnnnnnnnnnnnnnnnnnnnnnnnnnnnnnnnnnnnnnnnnnnnnnnnnnnnnnnnnnnnnnnnnnnnnnnnnnnnnnnnnnnnnnnnnnnnnnnnnnnnnnnnnnnnnnnnnnnnnnnnnnnnnnnnnnnnnnnnnnnnnnnnnnnnnnnnnnnnnnnnnnnnnnnnnnnnnnnnnnnnnnnnnnnnnnnnnnnnnnnnnnnnnnnnnnnnnnnnnnnnnnnnnnnnnnnnnnnnnnnnnnnnnnnnnnnnnnnnnnnnnnnnnnnnnnnnnnnnnnnnnnnnnnnnnnnnnnnnnnnnnnnnnnnnnnnnnnnnnnnnnnnnnnnnnnnnnnnnnnnnnnnnnnnnnnnnnnnnnnnnnnnnnnnnnnnnnnnnnnnnnnnnnnnnnnnnnnnnnnnnnnnnnnnnnnnnnnnnnnnnnnnnnnnnnnnnnnnnnnnnnnnnnnnnnnnnnnnnnnnnnnnnnnnnnnnnnnnnnnnnnnnnnnnnnnnnnnnnnnnnnnnnnnnnnnnnnnnnnnnnnnnnnnnnnnnnnnnnnnnnnnnnnnnnnnnnnnnnnnnnnnnnnnnnnnnnnnnnnnnnnnnnnnnnnnnnnnnnnnnnnnnnnnnnnnnnnnnnnnnnnnnnnnnnnnnnnnnnnnnnnnnnnnnnnnnnnnnnnnnnnnnnnnnnnnnnnnnnnnnnnnnnnnnnnnnnnnnnnnnnnnnnnnnnnnnnnnnnnnnnnnnnnnnnnnnnnnnnnnnnnnnnnnnnnnnnnnnnnnnnnnnnnnnnnnnnnnnnnnnnnnnnnnnnnnnnnnnnnnnnnnnnnnnnnnnnnnnnnnnnnnnnnnnnnnnnnnnnnnnnnnnnnnnnnnnnnnnnnnnnnnnnnnnnnnnnnnnnnnnnnnnnnnnnnnnnnnnnnnnnnnnnnnnnnnnnnnnnnnnnnnnnnnnnnnnnnnnnnnnnnnnnnnnnnnnnnnnnnnnnnnnnnnnnnnnnnnnnnnnnnnnnnnnnnnnnnnnnnnnnnnnnnnnnnnnnnnnnnnnnnnnnnnnnnnnnnnnnnnnnnnnnnnnnnnnnnnnnnnnnnnnnnnnnnnnnnnnnnnnnnnnnnnnnnnnnnnnnnnnnnnnnnnnnnnnnnnnnnnnnnnnnnnnnnnnnnnnnnnnnnnnnnnnnnnnnnnnnnnnnnnnnnnnnnnnnnnnnnnnnnnnnnnnnnnnnnnnnnnnnnnnnnnnnnnnnnnnnnnnnnnnnnnnnnnnnnnnnnnnnnnnnnnnnnnnnnnnnnnnnnnnnnnnnnnnnnnnnnnnnnnnnnnnnnnnnnnnnnnnnnnnnnnnnnnnnnnnnnnnnnnnnnnnnnnnnnnnnnnnnnnnnnnnnnnnnnnnnnnnnnnnnnnnnnnnnnnnnnnnnnnnnnnnnnnnnnnnnnnnnnnnnnnnnnnnnnnnnnnnnnnnnnnnnnnnnnnnnnnnnnnnnnnnnnnnnnnnnnnnnnnnnnnnnnnnnnnnnnnnnnnnnnnnnnnnnnnnnnnnnnnnnnnnnnnnnnnnnnnnnnnnnnnnnnnnnnnnnnnnnnnnnnnnnnnnnnnnnnnnnnnnnnnnnnnnnnnnnnnnnnnnnnnnnnnnnnnnnnnnnnnnnnnnnnnnnnnnnnnnnnnnnnnnnnnnnnnnnnnnnnnnnnnnnnnnnnnnnnnnnnnnnnnnnnnnnnnnnnnnnnnnnnnnnnnnnnnnnnnnnnnnnnnnnnnnnnnnnnnnnnnnnnnnnnnnnnnnnnnnnnnnnnnnnnnnnnnnnnnnnnnnnnnnnnnnnnnnnnnnnnnnnnnnnnnnnnnnnnnnnnnnnnnnnnnnnnnnnnnnnnnnnnnnnnnnnnnnnnnnnnnnnnnnnnnnnnnnnnnnnnnnnnnnnnnnnnnnnnnnnnnnnnnnnnnnnnnnnnnnnnnnnnnnnnnnnnnnnnnnnnnnnnnnnnnnnnnnnnnnnnnnnnnnnnnnnnnnnnnnnnnnnnnnnnnnnnnnnnnnnnnnnnnnnnnnnnnnnnnnnnnnnnnnnnnnnnnnnnnnnnnnnnnnnnnnnnnnnnnnnnnnnnnnnnnnnnnnnnnnnnnnnnnnnnnnnnnnnnnnnnnnnnnnnnnnnnnnnnnnnnnnnnnnnnnnnnnnnnnnnnnnnnnnnnnnnnnnnnnnnnnnnnnnnnnnnnnnnnnnnnnnnnnnnnnnnnnnnnnnnnnnnnnnnnnnnnnnnnnnnnnnnnnnnnnnnnnnnnnnnnnnnnnnnnnnnnnnnnnnnnnnnnnnnnnnnnnnnnnnnnnnnnnnnnnnnnnnnnnnnnnnnnnnnnnnnnnnnnnnnnnnnnnnnnnnnnnnnnnnnnnnnnnnnnnnnnnnnnnnnnnnnnnnnnnnnnnnnnnnnnnnnnnnnnnnnnnnnnnnnnnnnnnnnnnnnnnnnnnnnnnnnnnnnnnnnnnnnnnnnnnnnnnnnnnnnnnnnnnnnnnnnnnnnnnnnnnnnnnnnnnnnnnnnnnnnnnnnnnnnnnnnnnnnnnnnnnnnnnnnnnnnnnnnnnnnnnnnnnnnnnnnnnnnnnnnnnnnnnnnnnnnnnnnnnnnnnnnnnnnnnnnnnnnnnnnnnnnnnnnnnnnnnnnnnnnnnnnnnnnnnnnnnnnnnnnnnnnnnnnnnnnnnnnnnnnnnnnnnnnnnnnnnnnnnnnnnnnnnnnnnnnnnnnnnnnnnnnnnnnnnnnnnnnnnnnnnnnnnnnnnnnnnnnnnnnnnnnnnnnnnnnnnnnnnnnnnnnnnnnnnnnnnnnnnnnnnnnnnnnnnnnnnnnnnnnnnnnnnnnnnnnnnnnnnnnnnnnnnnnnnnnnnnnnnnnnnnnnnnnnnnnnnnnnnnnnnnnnnnnnnnnnnnnnnnnnnnnnnnnnnnnnnnnnnnnnnnnnnnnnnnnnnnnnnnnnnnnnnnnnnnnnnnnnnnnnnnnnnnnnnnnnnnnnnnnnnnnnnnnnnnnnnnnnnnnnnnnnnnnnnnnnnnnnnnnnnnnnnnnnnnnnnnnnnnnnnnnnnnnnnnnnnnnnnnnnnnnnnnnnnnnnnnnnnnnnnnnnnnnnnnnnnnnnnnnnnnnnnnnnnnnnnnnnnnnnnnnnnnnnnnnnnnnnnnnnnnnnnnnnnnnnnnnnnnnnnnnnnnnnnnnnnnnnnnnnnnnnnnnnnnnnnnnnnnnnnnnnnnnnnnnnnnnnnnnnnnnnnnnnnnnnnnnnnnnnnnnnnnnnnnnnnnnnnnnnnnnnnnnnnnnnnnnnnnnnnnnnnnnnnnnnnnnnnnnnnnnnnnnnnnnnnnnnnnnnnnnnnnnnnnnnnnnnnnnnnnnnnnnnnnnnnnnnnnnnnnnnnnnnnnnnnnnnnnnnnnnnnnnnnnnnnnnnnnnnnnnnnnnnnnnnnnnnnnnnnnnnnnnnnnnnnnnnnnnnnnnnnnnnnnnnnnnnnnnnnnnnnnnnnnnnnnnnnnnnnnnnnnnnnnnnnnnnnnnnnnnnnnnnnnnnnnnnnnnnnnnnnnnnnnnnnnnnnnnnnnnnnnnnnnnnnnnnnnnnnnnnnnnnnnnnnnnnnnnnnnnnnnnnnnnnnnnnnnnnnnnnnnnnnnnnnnnnnnnnnnnnnnnnnnnnnnnnnnnnnnnnnnnnnnnnnnnnnnnnnnnnnnnnnnnnnnnnnnnnnnnnnnnnnnnnnnnnnnnnnnnnnnnnnnnnnnnnnnnnnnnnnnnnnnnnnnnnnnnnnnnnnnnnnnnnnnnnnnnnnnnnnnnnnnnnnnnnnnnnnnnnnnnnnnnnnnnnnnnnnnnnnnnnnnnnnnnnnnnnnnnnnnnnnnnnnnnnnnnnnnnnnnnnnnnnnnnnnnnnnnnnnnnnnnnnnnnnnnnnnnnnnnnnnnnnnnnnnnnnnnnnnnnnnnnnnnnnnnnnnnnnnnnnnnnnnnnnnnnnnnnnnnnnnnnnnnnnnnnnnnnnnnnnnnnnnnnnnnnnnnnnnnnnnnnnnnnnnnnnnnnnnnnnnnnnnnnnnnnnnnnnnnnnnnnnnnnnnnnnnnnnnnnnnnnnnnnnnnnnnnnnnnnnnnnnnnnnnnnnnnnnnnnnnnnnnnnnnnnnnnnnnnnnnnnnnnnnnnnnnnnnnnnnnnnnnnnnnnnnnnnnnnnnnnnnnnnnnnnnnnnnnnnnnnnnnnnnnnnnnnnnnnnnnnnnnnnnnnnnnnnnnnnnnnnnnnnnnnnnnnnnnnnnnnnnnnnnnnnnnnnnnnnnnnnnnnnnnnnnnnnnnnnnnnnnnnnnnnnnnnnnnnnnnnnnnnnnnnnnnnnnnnnnnnnnnnnnnnnnnnnnnnnnnnnnnnnnnnnnnnnnnnnnnnnnnnnnnnnnnnnnnnnnnnnnnnnnnnnnnnnnnnnnnnnnnnnnnnnnnnnnnnnnnnnnnnnnnnnnnnnnnnnnnnnnnnnnnnnnnnnnnnnnnnnnnnnnnnnnnnnnnnnnnnnnnnnnnnnnnnnnnnnnnnnnnnnnnnnnnnnnnnnnnnnnnnnnnnnnnnnnnnnnnnnnnnnnnnnnnnnnnnnnnnnnnnnnnnnnnnnnnnnnnnnnnnnnnnnnnnnnnnnnnnnnnnnnnnnnnnnnnnnnnnnnnnnnnnnnnnnnnnnnnnnnnnnnnnnnnnnnnnnnnnnnnnnnnnnnnnnnnnnnnnnnnnnnnnnnnnnnnnnnnnnnnnnnnnnnnnnnnnnnnnnnnnnnnnnnnnnnnnnnnnnnnnnnnnnnnnnnnnnnnnnnnnnnnnnnnnnnnnnnnnnnnnnnnnnnnnnnnnnnnnnnnnnnnnnnnnnnnnnnnnnnnnnnnnnnnnnnnnnnnnnnnnnnnnnnnnnnnnnnnnnnnnnnnnnnnnnnnnnnnnnnnnnnnnnnnnnnnnnnnnnnnnnnnnnnnnnnnnnnnnnnnnnnnnnnnnnnnnnnnnnnnnnnnnnnnnnnnnnnnnnnnnnnnnnnnnnnnnnnnnnnnnnnnnnnnnnnnnnnnnnnnnnnnnnnnnnnnnnnnnnnnnnnnnnnnnnnnnnnnnnnnnnnnnnnnnnnnnnnnnnnnnnnnnnnnnnnnnnnnnnnnnnnnnnnnnnnnnnnnnnnnnnnnnnnnnnnnnnnnnnnnnnnnnnnnnnnnnnnnnnnnnnnnnnnnnnnnnnnnnnnnnnnnnnnnnnnnnnnnnnnnnnnnnnnnnnnnnnnnnnnnnnnnnnnnnnnnnnnnnnnnnnnnnnnnnnnnnnnnnnnnnnnnnnnnnnnnnnnnnnnnnnnnnnnnnnnnnnnnnnnnnnnnnnnnnnnnnnnnnnnnnnnnnnnnnnnnnnnnnnnnnnnnnnnnnnnnnnnnnnnnnnnnnnnnnnnnnnnnnnnnnnnnnnnnnnnnnnnnnnnnnnnnnnnnnnnnnnnnnnnnnnnnnnnnnnnnnnnnnnnnnnnnnnnnnnnnnnnnnnnnnnnnnnnnnnnnnnnnnnnnnnnnnnnnnnnnnnnnnnnnnnnnnnnnnnnnnnnnnnnnnnnnnnnnnnnnnnnnnnnnnnnnnnnnnnnnnnnnnnnnnnnnnnnnnnnnnnnnnnnnnnnnnnnnnnnnnnnnnnnnnnnnnnnnnnnnnnnnnnnnnnnnnnnnnnnnnnnnnnnnnnnnnnnnnnnnnnnnnnnnnnnnnnnnnnnnnnnnnnnnnnnnnnnnnnnnnnnnnnnnnnnnnnnnnnnnnnnnnnnnnnnnnnnnnnnnnnnnnnnnnnnnnnnnnnnnnnnnnnnnnnnnnnnnnnnnnnnnnnnnnnnnnnnnnnnnnnnnnnnnnnnnnnnnnnnnnnnnnnnnnnnnnnnnnnnnnnnnnnnnnnnnnnnnnnnnnnnnnnnnnnnnnnnnnnnnnnnnnnnnnnnnnnnnnnnnnnnnnnnnnnnnnnnnnnnnnnnnnnnnnnnnnnnnnnnnnnnnnnnnnnnnnnnnnnnnnnnnnnnnnnnnnnnnnnnnnnnnnnnnnnnnnnnnnnnnnnnnnnnnnnnnnnnnnnnnnnnnnnnnnnnnnnnnnnnnnnnnnnnnnnnnnnnnnnnnnnnnnnnnnnnnnnnnnnnnnnnnnnnnnnnnnnnnnnnnnnnnnnnnnnnnnnnnnnnnnnnnnnnnnnnnnnnnnnnnnnnnnnnnnnnnnnnnnnnnnnnnnnnnnnnnnnnnnnnnnnnnnnnnnnnnnnnnnnnnnnnnnnnnnnnnnnnnnnnnnnnnnnnnnnnnnnnnnnnnnnnnnnnnnnnnnnnnnnnnnnnnnnnnnnnnnnnnnnnnnnnnnnnnnnnnnnnnnnnnnnnnnnnnnnnnnnnnnnnnnnnnnnnnnnnnnnnnnnnnnnnnnnnnnnnnnnnnnnnnnnnnnnnnnnnnnnnnnnnnnnnnnnnnnnnnnnnnnnnnnnnnnnnnnnnnnnnnnnnnnnnnnnnnnnnnnnnnnnnnnnnnnnnnnnnnnnnnnnnnnnnnnnnnnnnnnnnnnnnnnnnnnnnnnnnnnnnnnnnnnnnnnnnnnnnnnnnnnnnnnnnnnnnnnnnnnnnnnnnnnnnnnnnnnnnnnnnnnnnnnnnnnnnnnnnnnnnnnnnnnnnnnnnnnnnnnnnnnnnnnnnnnnnnnnnnnnnnnnnnnnnnnnnnnnnnnnnnnnnnnnnnnnnnnnnnnnnnnnnnnnnnnnnnnnnnnnnnnnnnnnnnnnnnnnnnnnnnnnnnnnnnnnnnnnnnnnnnnnnnnnnnnnnnnnnnnnnnnnnnnnnnnnnnnnnnnnnnnnnnnnnnnnnnnnnnnnnnnnnnnnnnnnnnnnnnnnnnnnnnnnnnnnnnnnnnnnnnnnnnnnnnnnnnnnnnnnnnnnnnnnnnnnnnnnnnnnnnnnnnnnnnnnnnnnnnnnnnnnnnnnnnnnnnnnnnnnnnnnnnnnnnnnnnnnnnnnnnnnnnnnnnnnnnnnnnnnnnnnnnnnnnnnnnnnnnnnnnnnnnnnnnnnnnnnnnnnnnnnnnnnnnnnnnnnnnnnnnnnnnnnnnnnnnnnnnnnnnnnnnnnnnnnnnnnnnnnnnnnnnnnnnnnnnnnnnnnnnnnnnnnnnnnnnnnnnnnnnnnnnnnnnnnnnnnnnnnnnnnnnnnnnnnnnnnnnnnnnnnnnnnnnnnnnnnnnnnnnnnnnnnnnnnnnnnnnnnnnnnnnnnnnnnnnnnnnnnnnnnnnnnnnnnnnnnnnnnnnnnnnnnnnnnnnnnnnnnnnnnnnnnnnnnnnnnnnnnnnnnnnnnnnnnnnnnnnnnnnnnnnnnnnnnnnnnnnnnnnnnnnnnnnnnnnnnnnnnnnnnnnnnnnnnnnnnnnnnnnnnnnnnnnnnnnnnnnnnnnnnnnnnnnnnnnnnnnnnnnnnnnnnnnnnnnnnnnnnnnnnnnnnnnnnnnnnnnnnnnnnnnnnnnnnnnnnnnnnnnnnnnnnnnnnnnnnnnnnnnnnnnnnnnnnnnnnnnnnnnnnnnnnnnnnnnnnnnnnnnnnnnnnnnnnnnnnnnnnnnnnnnnnnnnnnnnnnnnnnnnnnnnnnnnnnnnnnnnnnnnnnnnnnnnnnnnnnnnnnnnnnnnnnnnnnnnnnnnnnnnnnnnnnnnnnnnnnnnnnnnnnnnnnnnnnnnnnnnnnnnnnnnnnnnnnnnnnnnnnnnnnnnnnnnnnnnnnnnnnnnnnnnnnnnnnnnnnnnnnnnnnnnnnnnnnnnnnnnnnnnnnnnnnnnnnnnnnnnnnnnnnnnnnnnnnnnnnnnnnnnnnnnnnnnnnnnnnnnnnnnnnnnnnnnnnnnnnnnnnnnnnnnnnnnnnnnnnnnnnnnnnnnnnnnnnnnnnnnnnnnnnnnnnnnnnnnnnnnnnnnnnnnnnnnnnnnnnnnnnnnnnnnnnnnnnnnnnnnnnnnnnnnnnnnnnnnnnnnnnnnnnnnnnnnnnnnnnnnnnnnnnnnnnnnnnnnnnnnnnnnnnnnnnnnnnnnnnnnnnnnnnnnnnnnnnnnnnnnnnnnnnnnnnnnnnnnnnnnnnnnnnnnnnnnnnnnnnnnnnnnnnnnnnnnnnnnnnnnnnnnnnnnnnnnnnnnnnnnnnnnnnnnnnnnnnnnnnnnnnnnnnnnnnnnnnnnnnnnnnnnnnnnnnnnnnnnnnnnnnnnnnnnnnnnnnnnnnnnnnnnnnnnnnnnnnnnnnnnnnnnnnnnnnnnnnnnnnnnnnnnnnnnnnnnnnnnnnnnnnnnnnnnnnnnnnnnnnnnnnnnnnnnnnnnnnnnnnnnnnnnnnnnnnnnnnnnnnnnnnnnnnnnnnnnnnnnnnnnnnnnnnnnnnnnnnnnnnnnnnnnnnnnnnnnnnnnnnnnnnnnnnnnnnnnnnnnnnnnnnnnnnnnnnnnnnnnnnnnnnnnnnnnnnnnnnnnnnnnnnnnnnnnnnnnnnnnnnnnnnnnnnnnnnnnnnnnnnnnnnnnnnnnnnnnnnnnnnnnnnnnnnnnnnnnnnnnnnnnnnnnnnnnnnnnnnnnnnnnnnnnnnnnnnnnnnnnnnnnnnnnnnnnnnnnnnnnnnnnnnnnnnnnnnnnnnnnnnnnnnnnnnnnnnnnnnnnnnnnnnnnnnnnnnnnnnnnnnnnnnnnnnnnnnnnnnnnnnnnnnnnnnnnnnnnnnnnnnnnnnnnnnnnnnnnnnnnnnnnnnnnnnnnnnnnnnnnnnnnnnnnnnnnnnnnnnnnnnnnnnnnnnnnnnnnnnnnnnnnnnnnnnnnnnnnnnnnnnnnnnnnnnnnnnnnnnnnnnnnnnnnnnnnnnnnnnnnnnnnnnnnnnnnnnnnnnnnnnnnnnnnnnnnnnnnnnnnnnnnnnnnnnnnnnnnnnnnnnnnnnnnnnnnnnnnnnnnnnnnnnnnnnnnnnnnnnnnnnnnnnnnnnnnnnnnnnnnnnnnnnnnnnnnnnnnnnnnnnnnnnnnnnnnnnnnnnnnnnnnnnnnnnnnnnnnnnnnnnnnnnnnnnnnnnnnnnnnnnnnnnnnnnnnnnnnnnnnnnnnnnnnnnnnnnnnnnnnnnnnnnnnnnnnnnnnnnnnnnnnnnnnnnnnnnnnnnnnnnnnnnnnnnnnnnnnnnnnnnnnnnnnnnnnnnnnnnnnnnnnnnnnnnnnnnnnnnnnnnnnnnnnnnnnnnnnnnnnnnnnnnnnnnnnnnnnnnnnnnnnnnnnnnnnnnnnnnnnnnnnnnnnnnnnnnnnnnnnnnnnnnnnnnnnnnnnnnnnnnnnnnnnnnnnnnnnnnnnnnnnnnnnnnnnnnnnnnnnnnnnnnnnnnnnnnnnnnnnnnnnnnnnnnnnnnnnnnnnnnnnnnnnnnnnnnnnnnnnnnnnnnnnnnnnnnnnnnnnnnnnnnnnnnnnnnnnnnnnnnnnnnnnnnnnnnnnnnnnnnnnnnnnnnnnnnnnnnnnnnnnnnnnnnnnnnnnnnnnnnnnnnnnnnnnnnnnnnnnnnnnnnnnnnnnnnnnnnnnnnnnnnnnnnnnnnnnnnnnnnnnnnnnnnnnnnnnnnnnnnnnnnnnnnnnnnnnnnnnnnnnnnnnnnnnnnnnnnnnnnnnnnnnnnnnnnnnnnnnnnnnnnnnnnnnnnnnnnnnnnnnnnnnnnnnnnnnnnnnnnnnnnnnnnnnnnnnnnnnnnnnnnnnnnnnnnnnnnnnnnnnnnnnnnnnnnnnnnnnnnnnnnnnnnnnnnnnnnnnnnnnnnnnnnnnnnnnnnnnnnnnnnnnnnnnnnnnnnnnnnnnnnnnnnnnnnnnnnnnnnnnnnnnnnnnnnnnnnnnnnnnnnnnnnnnnnnnnnnnnnnnnnnnnnnnnnnnnnnnnnnnnnnnnnnnnnnnnnnnnnnnnnnnnnnnnnnnnnnnnnnnnnnnnnnnnnnnnnnnnnnnnnnnnnnnnnnnnnnnnnnnnnnnnnnnnnnnnnnnnnnnnnnnnnnnnnnnnnnnnnnnnnnnnnnnnnnnnnnnnnnnnnnnnnnnnnnnnnnnnnnnnnnnnnnnnnnnnnnnnnnnnnnnnnnnnnnnnnnnnnnnnnnnnnnnnnnnnnnnnnnnnnnnnnnnnnnnnnnnnnnnnnnnnnnnnnnnnnnnnnnnnnnnnnnnnnnnnnnnnnnnnnnnnnnnnnnnnnnnnnnnnnnnnnnnnnnnnnnnnnnnnnnnnnnnnnnnnnnnnnnnnnnnnnnnnnnnnnnnnnnnnnnnnnnnnnnnnnnnnnnnnnnnnnnnnnnnnnnnnnnnnnnnnnnnnnnnnnnnnnnnnnnnnnnnnnnnnnnnnnnnnnnnnnnnnnnnnnnnnnnnnnnnnnnnnnnnnnnnnnnnnnnnnnnnnnnnnnnnnnnnnnnnnnnnnnnnnnnnnnnnnnnnnnnnnnnnnnnnnnnnnnnnnnnnnnnnnnnnnnnnnnnnnnnnnnnnnnnnnnnnnnnnnnnnnnnnnnnnnnnnnnnnnnnnnnnnnnnnnnnnnnnnnnnnnnnnnnnnnnnnnnnnnnnnnnnnnnnnnnnnnnnnnnnnnnnnnnnnnnnnnnnnnnnnnnnnnnnnnnnnnnnnnnnnnnnnnnnnnnnnnnnnnnnnnnnnnnnnnnnnnnnnnnnnnnnnnnnnnnnnnnnnnnnnnnnnnnnnnnnnnnnnnnnnnnnnnnnnnnnnnnnnnnnnnnnnnnnnnnnnnnnnnnnnnnnnnnnnnnnnnnnnnnnnnnnnnnnnnnnnnnnnnnnnnnnnnnnnnnnnnnnnnnnnnnnnnnnnnnnnnnnnnnnnnnnnnnnnnnnnnnnnnnnnnnnnnnnnnnnnnnnnnnnnnnnnnnnnnnnnnnnnnnnnnnnnnnnnnnnnnnnnnnnnnnnnnnnnnnnnnnnnnnnnnnnnnnnnnnnnnnnnnnnnnnnnnnnnnnnnnnnnnnnnnnnnnnnnnnnnnnnnnnnnnnnnnnnnnnnnnnnnnnnnnnnnnnnnnnnnnnnnnnnnnnnnnnnnnnnnnnnnnnnnnnnnnnnnnnnnnnnnnnnnnnnnnnnnnnnnnnnnnnnnnnnnnnnnnnnnnnnnnnnnnnnnnnnnnnnnnnnnnnnnnnnnnnnnnnnnnnnnnnnnnnnnnnnnnnnnnnnnnnnnnnnnnnnnnnnnnnnnnnnnnnnnnnnnnnnnnnnnnnnnnnnnnnnnnnnnnnnnnnnnnnnnnnnnnnnnnnnnnnnnnnnnnnnnnnnnnnnnnnnnnnnnnnnnnnnnnnnnnnnnnnnnnnnnnnnnnnnnnnnnnnnnnnnnnnnnnnnnnnnnnnnnnnnnnnnnnnnnnnnnnnnnnnnnnnnnnnnnnnnnnnnnnnnnnnnnnnnnnnnnnnnnnnnnnnnnnnnnnnnnnnnnnnnnnnnnnnnnnnnnnnnnnnnnnnnnnnnnnnnnnnnnnnnnnnnnnnnnnnnnnnnnnnnnnnnnnnnnnnnnnnnnnnnnnnnnnnnnnnnnnnnnnnnnnnnnnnnnnnnnnnnnnnnnnnnnnnnnnnnnnnnnnnnnnnnnnnnnnnnnnnnnnnnnnnnnnnnnnnnnnnnnnnnnnnnnnnnnnnnnnnnnnnnnnnnnnnnnnnnnnnnnnnnnnnnnnnnnnnnnnnnnnnnnnnnnnnnnnnnnnnnnnnnnnnnnnnnnnnnnnnnnnnnnnnnnnnnnnnnnnnnnnnnnnnnnnnnnnnnnnnnnnnnnnnnnnnnnnnnnnnnnnnnnnnnnnnnnnnnnnnnnnnnnnnnnnnnnnnnnnnnnnnnnnnnnnnnnnnnnnnnnnnnnnnnnnnnnnnnnnnnnnnnnnnnnnnnnnnnnnnnnnnnnnnnnnnnnnnnnnnnnnnnnnnnnnnnnnnnnnnnnnnnnnnnnnnnnnnnnnnnnnnnnnnnnnnnnnnnnnnnnnnnnnnnnnnnnnnnnnnnnnnnnnnnnnnnnnnnnnnnnnnnnnnnnnnnnnnnnnnnnnnnnnnnnnnnnnnnnnnnnnnnnnnnnnnnnnnnnnnnnnnnnnnnnnnnnnnnnnnnnnnnnnnnnnnnnnnnnnnnnnnnnnnnnnnnnnnnnnnnnnnnnnnnnnnnnnnnnnnnnnnnnnnnnnnnnnnnnnnnnnnnnnnnnnnnnnnnnnnnnnnnnnnnnnnnnnnnnnnnnnnnnnnnnnnnnnnnnnnnnnnnnnnnnnnnnnnnnnnnnnnnnnnnnnnnnnnnnnnnnnnnnnnnnnnnnnnnnnnnnnnnnnnnnnnnnnnnnnnnnnnnnnnnnnnnnnnnnnnnnnnnnnnnnnnnnnnnnnnnnnnnnnnnnnnnnnnnnnnnnnnnnnnnnnnnnnnnnnnnnnnnnnnnnnnnnnnnnnnnnnnnnnnnnnnnnnnnnnnnnnnnnnnnnnnnnnnnnnnnnnnnnnnnnnnnnnnnnnnnnnnnnnnnnnnnnnnnnnnnnnnnnnnnnnnnnnnnnnnnnnnnnnnnnnnnnnnnnnnnnnnnnnnnnnnnnnnnnnnnnnnnnnnnnnnnnnnnnnnnnnnnnnnnnnnnnnnnnnnnnnnnnnnnnnnnnnnnnnnnnnnnnnnnnnnnnnnnnnnnnnnnnnnnnnnnnnnnnnnnnnnnnnnnnnnnnnnnnnnnnnnnnnnnnnnnnnnnnnnnnnnnnnnnnnnnnnnnnnnnnnnnnnnnnnnnnnnnnnnnnnnnnnnnnnnnnnnnnnnnnnnnnnnnnnnnnnnnnnnnnnnnnnnnnnnnnnnnnnnnnnnnnnnnnnnnnnnnnnnnnnnnnnnnnnnnnnnnnnnnnnnnnnnnnnnnnnnnnnnnnnnnnnnnnnnnnnnnnnnnnnnnnnnnnnnnnnnnnnnnnnnnnnnnnnnnnnnnnnnnnnnnnnnnnnnnnnnnnnnnnnnnnnnnnnnnnnnnnnnnnnnnnnnnnnnnnnnnnnnnnnnnnnnnnnnnnnnnnnnnnnnnnnnnnnnnnnnnnnnnnnnnnnnnnnnnnnnnnnnnnnnnnnnnnnnnnnnnnnnnnnnnnnnnnnnnnnnnnnnnnnnnnnnnnnnnnnnnnnnnnnnnnnnnnnnnnnnnnnnnnnnnnnnnnnnnnnnnnnnnnnnnnnnnnnnnnnnnnnnnnnnnnnnnnnnnnnnnnnnnnnnnnnnnnnnnnnnnnnnnnnnnnnnnnnnnnnnnnnnnnnnnnnnnnnnnnnnnnnnnnnnnnnnnnnnnnnnnnnnnnnnnnnnnnnnnnnnnnnnnnnnnnnnnnnnnnnnnnnnnnnnnnnnnnnnnnnnnnnnnnnnnnnnnnnnnnnnnnnnnnnnnnnnnnnnnnnnnnnnnnnnnnnnnnnnnnnnnnnnnnnnnnnnnnnnnnnnnnnnnnnnnnnnnnnnnnnnnnnnnnnnnnnnnnnnnnnnnnnnnnnnnnnnnnnnnnnnnnnnnnnnnnnnnnnnnnnnnnnnnnnnnnnnnnnnnnnnnnnnnnnnnnnnnnnnnnnnnnnnnnnnnnnnnnnnnnnnnnnnnnnnnnnnnnnnnnnnnnnnnnnnnnnnnnnnnnnnnnnnnnnnnnnnnnnnnnnnnnnnnnnnnnnnnnnnnnnnnnnnnnnnnnnnnnnnnnnnnnnnnnnnnnnnnnnnnnnnnnnnnnnnnnnnnnnnnnnnnnnnnnnnnnnnnnnnnnnnnnnnnnnnnnnnnnnnnnnnnnnnnnnnnnnnnnnnnnnnnnnnnnnnnnnnnnnnnnnnnnnnnnnnnnnnnnnnnnnnnnnnnnnnnnnnnnnnnnnnnnnnnnnnnnnnnnnnnnnnnnnnnnnnnnnnnnnnnnnnnnnnnnnnnnnnnnnnnnnnnnnnnnnnnnnnnnnnnnnnnnnnnnnnnnnnnnnnnnnnnnnnnnnnnnnnnnnnnnnnnnnnnnnnnnnnnnnnnnnnnnnnnnnnnnnnnnnnnnnnnnnnnnnnnnnnnnnnnnnnnnnnnnnnnnnnnnnnnnnnnnnnnnnnnnnnnnnnnnnnnnnnnnnnnnnnnnnnnnnnnnnnnnnnnnnnnnnnnnnnnnnnnnnnnnnnnnnnnnnnnnnnnnnnnnnnnnnnnnnnnnnnnnnnnnnnnnnnnnnnnnnnnnnnnnnnnnnnnnnnnnnnnnnnnnnnnnnnnnnnnnnnnnnnnnnnnnnnnnnnnnnnnnnnnnnnnnnnnnnnnnnnnnnnnnnnnnnnnnnnnnnnnnnnnnnnnnnnnnnnnnnnnnnnnnnnnnnnnnnnnnnnnnnnnnnnnnnnnnnnnnnnnnnnnnnnnnnnnnnnnnnnnnnnnnnnnnnnnnnnnnnnnnnnnnnnnnnnnnnnnnnnnnnnnnnnnnnnnnnnnnnnnnnnnnnnnnnnnnnnnnnnnnnnnnnnnnnnnnnnnnnnnnnnnnnnnnnnnnnnnnnnnnnnnnnnnnnnnnnnnnnnnnnnnnnnnnnnnnnnnnnnnnnnnnnnnnnnnnnnnnnnnnnnnnnnnnnnnnnnnnnnnnnnnnnnnnnnnnnnnnnnnnnnnnnnnnnnnnnnnnnnnnnnnnnnnnnnnnnnnnnnnnnnnnnnnnnnnnnnnnnnnnnnnnnnnnnnnnnnnnnnnnnnnnnnnnnnnnnnnnnnnnnnnnnnnnnnnnnnnnnnnnnnnnnnnnnnnnnnnnnnnnnnnnnnnnnnnnnnnnnnnnnnnnnnnnnnnnnnnnnnnnnnnnnnnnnnnnnnnnnnnnnnnnnnnnnnnnnnnnnnnnnnnnnnnnnnnnnnnnnnnnnnnnnnnnnnnnnnnnnnnnnnnnnnnnnnnnnnnnnnnnnnnnnnnnnnnnnnnnnnnnnnnnnnnnnnnnnnnnnnnnnnnnnnnnnnnnnnnnnnnnnnnnnnnnnnnnnnnnnnnnnnnnnnnnnnnnnnnnnnnnnnnnnnnnnnnnnnnnnnnnnnnnnnnnnnnnnnnnnnnnnnnnnnnnnnnnnnnnnnnnnnnnnnnnnnnnnnnnnnnnnnnnnnnnnnnnnnnnnnnnnnnnnnnnnnnnnnnnnnnnnnnnnnnnnnnnnnnnnnnnnnnnnnnnnnnnnnnnnnnnnnnnnnnnnnnnnnnnnnnnnnnnnnnnnnnnnnnnnnnnnnnnnnnnnnnnnnnnnnnnnnnnnnnnnnnnnnnnnnnnnnnnnnnnnnnnnnnnnnnnnnnnnnnnnnnnnnnnnnnnnnnnnnnnnnnnnnnnnnnnnnnnnnnnnnnnnnnnnnnnnnnnnnnnnnnnnnnnnnnnnnnnnnnnnnnnnnnnnnnnnnnnnnnnnnnnnnnnnnnnnnnnnnnnnnnnnnnnnnnnnnnnnnnnnnnnnnnnnnnnnnnnnnnnnnnnnnnnnnnnnnnnnnnnnnnnnnnnnnnnnnnnnnnnnnnnnnnnnnnnnnnnnnnnnnnnnnnnnnnnnnnnnnnnnnnnnnnnnnnnnnnnnnnnnnnnnnnnnnnnnnnnnnnnnnnnnnnnnnnnnnnnnnnnnnnnnnnnnnnnnnnnnnnnnnnnnnnnnnnnnnnnnnnnnnnnnnnnnnnnnnnnnnnnnnnnnnnnnnnnnnnnnnnnnnnnnnnnnnnnnnnnnnnnnnnnnnnnnnnnnnnnnnnnnnnnnnnnnnnnnnnnnnnnnnnnnnnnnnnnnnnnnnnnnnnnnnnnnnnnnnnnnnnnnnnnnnnnnnnnnnnnnnnnnnnnnnnnnnnnnnnnnnnnnnnnnnnnnnnnnnnnnnnnnnnnnnnnnnnnnnnnnnnnnnnnnnnnnnnnnnnnnnnnnnnnnnnnnnnnnnnnnnnnnnnnnnnnnnnnnnnnnnnnnnnnnnnnnnnnnnnnnnnnnnnnnnnnnnnnnnnnnnnnnnnnnnnnnnnnnnnnnnnnnnnnnnnnnnnnnnnnnnnnnnnnnnnnnnnnnnnnnnnnnnnnnnnnnnnnnnnnnnnnnnnnnnnnnnnnnnnnnnnnnnnnnnnnnnnnnnnnnnnnnnnnnnnnnnnnnnnnnnnnnnnnnnnnnnnnnnnnnnnnnnnnnnnnnnnnnnnnnnnnnnnnnnnnnnnnnnnnnnnnnnnnnnnnnnnnnnnnnnnnnnnnnnnnnnnnnnnnnnnnnnnnnnnnnnnnnnnnnnnnnnnnnnnnnnnnnnnnnnnnnnnnnnnnnnnnnnnnnnnnnnnnnnnnnnnnnnnnnnnnnnnnnnnnnnnnnnnnnnnnnnnnnnnnnnnnnnnnnnnnnnnnnnnnnnnnnnnnnnnnnnnnnnnnnnnnnnnnnnnnnnnnnnnnnnnnnnnnnnnnnnnnnnnnnnnnnnnnnnnnnnnnnnnnnnnnnnnnnnnnnnnnnnnnnnnnnnnnnnnnnnnnnnnnnnnnnnnnnnnnnnnnnnnnnnnnnnnnnnnnnnnnnnnnnnnnnnnnnnnnnnnnnnnnnnnnnnnnnnnnnnnnnnnnnnnnnnnnnnnnnnnnnnnnnnnnnnnnnnnnnnnnnnnnnnnnnnnnnnnnnnnnnnnnnnnnnnnnnnnnnnnnnnnnnnnnnnnnnnnnnnnnnnnnnnnnnnnnnnnnnnnnnnnnnnnnnnnnnnnnnnnnnnnnnnnnnnnnnnnnnnnnnnnnnnnnnnnnnnnnnnnnnnnnnnnnnnnnnnnnnnnnnnnnnnnnnnnnnnnnnnnnnnnnnnnnnnnnnnnnnnnnnnnnnnnnnnnnnnnnnnnnnnnnnnnnnnnnnnnnnnnnnnnnnnnnnnnnnnnnnnnnnnnnnnnnnnnnnnnnnnnnnnnnnnnnnnnnnnnnnnnnnnnnnnnnnnnnnnnnnnnnnnnnnnnnnnnnnnnnnnnnnnnnnnnnnnnnnnnnnnnnnnnnnnnnnnnnnnnnnnnnnnnnnnnnnnnnnnnnnnnnnnnnnnnnnnnnnnnnnnnnnnnnnnnnnnnnnnnnnnnnnnnnnnnnnnnnnnnnnnnnnnnnnnnnnnnnnnnnnnnnnnnnnnnnnnnnnnnnnnnnnnnnnnnnnnnnnnnnnnnnnnnnnnnnnnnnnnnnnnnnnnnnnnnnnnnnnnnnnnnnnnnnnnnnnnnnnnnnnnnnnnnnnnnnnnnnnnnnnnnnnnnnnnnnnnnnnnnnnnnnnnnnnnnnnnnnnnnnnnnnnnnnnnnnnnnnnnnnnnnnnnnnnnnnnnnnnnnnnnnnnnnnnnnnnnnnnnnnnnnnnnnnnnnnnnnnnnnnnnnnnnnnnnnnnnnnnnnnnnnnnnnnnnnnnnnnnnnnnnnnnnnnnnnnnnnnnnnnnnnnnnnnnnnnnnnnnnnnnnnnnnnnnnnnnnnnnnnnnnnnnnnnnnnnnnnnnnnnnnnnnnnnnnnnnnnnnnnnnnnnnnnnnnnnnnnnnnnnnnnnnnnnnnnnnnnnnnnnnnnnnnnnnnnnnnnnnnnnnnnnnnnnnnnnnnnnnnnnnnnnnnnnnnnnnnnnnnnnnnnnnnnnnnnnnnnnnnnnnnnnnnnnnnnnnnnnnnnnnnnnnnnnnnnnnnnnnnnnnnnnnnnnnnnnnnnnnnnnnnnnnnnnnnnnnnnnnnnnnnnnnnnnnnnnnnnnnnnnnnnnnnnnnnnnnnnnnnnnnnnnnnnnnnnnnnnnnnnnnnnnnnnnnnnnnnnnnnnnnnnnnnnnnnnnnnnnnnnnnnnnnnnnnnnnnnnnnnnnnnnnnnnnnnnnnnnnnnnnnnnnnnnnnnnnnnnnnnnnnnnnnnnnnnnnnnnnnnnnnnnnnnnnnnnnnnnnnnnnnnnnnnnnnnnnnnnnnnnnnnnnnnnnnnnnnnnnnnnnnnnnnnnnnnnnnnnnnnnnnnnnnnnnnnnnnnnnnnnnnnnnnnnnnnnnnnnnnnnnnnnnnnnnnnnnnnnnnnnnnnnnnnnnnnnnnnnnnnnnnnnnnnnnnnnnnnnnnnnnnnnnnnnnnnnnnnnnnnnnnnnnnnnnnnnnnnnnnnnnnnnnnnnnnnnnnnnnnnnnnnnnnnnnnnnnnnnnnnnnnnnnnnnnnnnnnnnnnnnnnnnnnnnnnnnnnnnnnnnnnnnnnnnnnnnnnnnnnnnnnnnnnnnnnnnnnnnnnnnnnnnnnnnnnnnnnnnnnnnnnnnnnnnnnnnnnnnnnnnnnnnnnnnnnnnnnnnnnnnnnnnnnnnnnnnnnnnnnnnnnnnnnnnnnnnnnnnnnnnnnnnnnnnnnnnnnnnnnnnnnnnnnnnnnnnnnnnnnnnnnnnnnnnnnnnnnnnnnnnnnnnnnnnnnnnnnnnnnnnnnnnnnnnnnnnnnnnnnnnnnnnnnnnnnnnnnnnnnnnnnnnnnnnnnnnnnnnnnnnnnnnnnnnnnnnnnnnnnnnnnnnnnnnnnnnnnnnnnnnnnnnnnnnnnnnnnnnnnnnnnnnnnnnnnnnnnnnnnnnnnnnnnnnnnnnnnnnnnnnnnnnnnnnnnnnnnnnnnnnnnnnnnnnnnnnnnnnnnnnnnnnnnnnnnnnnnnnnnnnnnnnnnnnnnnnnnnnnnnnnnnnnnnnnnnnnnnnnnnnnnnnnnnnnnnnnnnnnnnnnnnnnnnnnnnnnnnnnnnnnnnnnnnnnnnnnnnnnnnnnnnnnnnnnnnnnnnnnnnnnnnnnnnnnnnnnnnnnnnnnnnnnnnnnnnnnnnnnnnnnnnnnnnnnnnnnnnnnnnnnnnnnnnnnnnnnnnnnnnnnnnnnnnnnnnnnnnnnnnnnnnnnnnnnnnnnnnnnnnnnnnnnnnnnnnnnnnnnnnnnnnnnnnnnnnnnnnnnnnnnnnnnnnnnnnnnnnnnnnnnnnnnnnnnnnnnnnnnnnnnnnnnnnnnnnnnnnnnnnnnnnnnnnnnnnnnnnnnnnnnnnnnnnnnnnnnnnnnnnnnnnnnnnnnnnnnnnnnnnnnnnnnnnnnnnnnnnnnnnnnnnnnnnnnnnnnnnnnnnnnnnnnnnnnnnnnnnnnnnnnnnnnnnnnnnnnnnnnnnnnnnnnnnnnnnnnnnnnnnnnnnnnnnnnnnnnnnnnnnnnnnnnnnnnnnnnnnnnnnnnnnnnnnnnnnnnnnnnnnnnnnnnnnnnnnnnnnnnnnnnnnnnnnnnnnnnnnnnnnnnnnnnnnnnnnnnnnnnnnnnnnnnnnnnnnnnnnnnnnnnnnnnnnnnnnnnnnnnnnnnnnnnnnnnnnnnnnnnnnnnnnnnnnnnnnnnnnnnnnnnnnnnnnnnnnnnnnnnnnnnnnnnnnnnnnnnnnnnnnnnnnnnnnnnnnnnnnnnnnnnnnnnnnnnnnnnnnnnnnnnnnnnnnnnnnnnnnnnnnnnnnnnnnnnnnnnnnnnnnnnnnnnnnnnnnnnnnnnnnnnnnnnnnnnnnnnnnnnnnnnnnnnnnnnnnnnnnnnnnnnnnnnnnnnnnnnnnnnnnnnnnnnnnnnnnnnnnnnnnnnnnnnnnnnnnnnnnnnnnnnnnnnnnnnnnnnnnnnnnnnnnnnnnnnnnnnnnnnnnnnnnnnnnnnnnnnnnnnnnnnnnnnnnnnnnnnnnnnnnnnnnnnnnnnnnnnnnnnnnnnnnnnnnnnnnnnnnnnnnnnnnnnnnnnnnnnnnnnnnnnnnnnnnnnnnnnnnnnnnnnnnnnnnnnnnnnnnnnnnnnnnnnnnnnnnnnnnnnnnnnnnnnnnnnnnnnnnnnnnnnnnnnnnnnnnnnnnnnnnnnnnnnnnnnnnnnnnnnnnnnnnnnnnnnnnnnnnnnnnnnnnnnnnnnnnnnnnnnnnnnnnnnnnnnnnnnnnnnnnnnnnnnnnnnnnnnnnnnnnnnnnnnnnnnnnnnnnnnnnnnnnnnnnnnnnnnnnnnnnnnnnnnnnnnnnnnnnnnnnnnnnnnnnnnnnnnnnnnnnnnnnnnnnnnnnnnnnnnnnnnnnnnnnnnnnnnnnnnnnnnnnnnnnnnnnnnnnnnnnnnnnnnnnnnnnnnnnnnnnnnnnnnnnnnnnnnnnnnnnnnnnnnnnnnnnnnnnnnnnnnnnnnnnnnnnnnnnnnnnnnnnnnnnnnnnnnnnnnnnnnnnnnnnnnnnnnnnnnnnnnnnnnnnnnnnnnnnnnnnnnnnnnnnnnnnnnnnnnnnnnnnnnnnnnnnnnnnnnnnnnnnnnnnnnnnnnnnnnnnnnnnnnnnnnnnnnnnnnnnnnnnnnnnnnnnnnnnnnnnnnnnnnnnnnnnnnnnnnnnnnnnnnnnnnnnnnnnnnnnnnnnnnnnnnnnnnnnnnnnnnnnnnnnnnnnnnnnnnnnnnnnnnnnnnnnnnnnnnnnnnnnnnnnnnnnnnnnnnnnnnnnnnnnnnnnnnnnnnnnnnnnnnnnnnnnnnnnnnnnnnnnnnnnnnnnnnnnnnnnnnnnnnnnnnnnnnnnnnnnnnnnnnnnnnnnnnnnnnnnnnnnnnnnnnnnnnnnnnnnnnnnnnnnnnnnnnnnnnnnnnnnnnnnnnnnnnnnnnnnnnnnnnnnnnnnnnnnnnnnnnnnnnnnnnnnnnnnnnnnnnnnnnnnnnnnnnnnnnnnnnnnnnnnnnnnnnnnnnnnnnnnnnnnnnnnnnnnnnnnnnnnnnnnnnnnnnnnnnnnnnnnnnnnnnnnnnnnnnnnnnnnnnnnnnnnnnnnnnnnnnnnnnnnnnnnnnnnnnnnnnnnnnnnnnnnnnnnnnnnnnnnnnnnnnnnnnnnnnnnnnnnnnnnnnnnnnnnnnnnnnnnnnnnnnnnnnnnnnnnnnnnnnnnnnnnnnnnnnnnnnnnnnnnnnnnnnnnnnnnnnnnnnnnnnnnnnnnnnnnnnnnnnnnnnnnnnnnnnnnnnnnnnnnnnnnnnnnnnnnnnnnnnnnnnnnnnnnnnnnnnnnnnnnnnnnnnnnnnnnnnnnnnnnnnnnnnnnnnnnnnnnnnnnnnnnnnnnnnnnnnnnnnnnnnnnnnnnnnnnnnnnnnnnnnnnnnnnnnnnnnnnnnnnnnnnnnnnnnnnnnnnnnnnnnnnnnnnnnnnnnnnnnnnnnnnnnnnnnnnnnnnnnnnnnnnnnnnnnnnnnnnnnnnnnnnnnnnnnnnnnnnnnnnnnnnnnnnnnnnnnnnnnnnnnnnnnnnnnnnnnnnnnnnnnnnnnnnnnnnnnnnnnnnnnnnnnnnnnnnnnnnnnnnnnnnnnnnnnnnnnnnnnnnnnnnnnnnnnnnnnnnnnnnnnnnnnnnnnnnnnnnnnnnnnnnnnnnnnnnnnnnnnnnnnnnnnnnnnnnnnnnnnnnnnnnnnnnnnnnnnnnnnnnnnnnnnnnnnnnnnnnnnnnnnnnnnnnnnnnnnnnnnnnnnnnnnnnnnnnnnnnnnnnnnnnnnnnnnnnnnnnnnnnnnnnnnnnnnnnnnnnnnnnnnnnnnnnnnnnnnnnnnnnnnnnnnnnnnnnnnnnnnnnnnnnnnnnnnnnnnnnnnnnnnnnnnnnnnnnnnnnnnnnnnnnnnnnnnnnnnnnnnnnnnnnnnnnnnnnnnnnnnnnnnnnnnnnnnnnnnnnnnnnnnnnnnnnnnnnnnnnnnnnnnnnnnnnnnnnnnnnnnnnnnnnnnnnnnnnnnnnnnnnnnnnnnnnnnnnnnnnnnnnnnnnnnnnnnnnnnnnnnnnnnnnnnnnnnnnnnnnnnnnnnnnnnnnnnnnnnnnnnnnnnnnnnnnnnnnnnnnnnnnnnnnnnnnnnnnnnnnnnnnnnnnnnnnnnnnnnnnnnnnnnnnnnnnnnnnnnnnnnnnnnnnnnnnnnnnnnnnnnnnnnnnnnnnnnnnnnnnnnnnnnnnnnnnnnnnnnnnnnnnnnnnnnnnnnnnnnnnnnnnnnnnnnnnnnnnnnnnnnnnnnnnnnnnnnnnnnnnnnnnnnnnnnnnnnnnnnnnnnnnnnnnnnnnnnnnnnnnnnnnnnnnnnnnnnnnnnnnnnnnnnnnnnnnnnnnnnnnnnnnnnnnnnnnnnnnnnnnnnnnnnnnnnnnnnnnnnnnnnnnnnnnnnnnnnnnnnnnnnnnnnnnnnnnnnnnnnnnnnnnnnnnnnnnnnnnnnnnnnnnnnnnnnnnnnnnnnnnnnnnnnnnnnnnnnnnnnnnnnnnnnnnnnnnnnnnnnnnnnnnnnnnnnnnnnnnnnnnnnnnnnnnnnnnnnnnnnnnnnnnnnnnnnnnnnnnnnnnnnnnnnnnnnnnnnnnnnnnnnnnnnnnnnnnnnnnnnnnnnnnnnnnnnnnnnnnnnnnnnnnnnnnnnnnnnnnnnnnnnnnnnnnnnnnnnnnnnnnnnnnnnnnnnnnnnnnnnnnnnnnnnnnnnnnnnnnnnnnnnnnnnnnnnnnnnnnnnnnnnnnnnnnnnnnnnnnnnnnnnnnnnnnnnnnnnnnnnnnnnnnnnnnnnnnnnnnnnnnnnnnnnnnnnnnnnnnnnnnnnnnnnnnnnnnnnnnnnnnnnnnnnnnnnnnnnnnnnnnnnnnnnnnnnnnnnnnnnnnnnnnnnnnnnnnnnnnnnnnnnnnnnnnnnnnnnnnnnnnnnnnnnnnnnnnnnnnnnnnnnnnnnnnnnnnnnnnnnnnnnnnnnnnnnnnnnnnnnnnnnnnnnnnnnnnnnnnnnnnnnnnnnnnnnnnnnnnnnnnnnnnnnnnnnnnnnnnnnnnnnnnnnnnnnnnnnnnnnnnnnnnnnnnnnnnnnnnnnnnnnnnnnnnnnnnnnnnnnnnnnnnnnnnnnnnnnnnnnnnnnnnnnnnnnnnnnnnnnnnnnnnnnnnnnnnnnnnnnnnnnnnnnnnnnnnnnnnnnnnnnnnnnnnnnnnnnnnnnnnnnnnnnnnnnnnnnnnnnnnnnnnnnnnnnnnnnnnnnnnnnnnnnnnnnnnnnnnnnnnnnnnnnnnnnnnnnnnnnnnnnnnnnnnnnnnnnnnnnnnnnnnnnnnnnnnnnnnnnnnnnnnnnnnnnnnnnnnnnnnnnnnnnnnnnnnnnnnnnnnnnnnnnnnnnnnnnnnnnnnnnnnnnnnnnnnnnnnnnnnnnnnnnnnnnnnnnnnnnnnnnnnnnnnnnnnnnnnnnnnnnnnnnnnnnnnnnnnnnnnnnnnnnnnnnnnnnnnnnnnnnnnnnnnnnnnnnnnnnnnnnnnnnnnnnnnnnnnnnnnnnnnnnnnnnnnnnnnnnnnnnnnnnnnnnnnnnnnnnnnnnnnnnnnnnnnnnnnnnnnnnnnnnnnnnnnnnnnnnnnnnnnnnnnnnnnnnnnnnnnnnnnnnnnnnnnnnnnnnnnnnnnnnnnnnnnnnnnnnnnnnnnnnnnnnnnnnnnnnnnnnnnnnnnnnnnnnnnnnnnnnnnnnnnnnnnnnnnnnnnnnnnnnnnnnnnnnnnnnnnnnnnnnnnnnnnnnnnnnnnnnnnnnnnnnnnnnnnnnnnnnnnnnnnnnnnnnnnnnnnnnnnnnnnnnnnnnnnnnnnnnnnnnnnnnnnnnnnnnnnnnnnnnnnnnnnnnnnnnnnnnnnnnnnnnnnnnnnnnnnnnnnnnnnnnnnnnnnnnnnnnnnnnnnnnnnnnnnnnnnnnnnnnnnnnnnnnnnnnnnnnnnnnnnnnnnnnnnnnnnnnnnnnnnnnnnnnnnnnnnnnnnnnnnnnnnnnnnnnnnnnnnnnnnnnnnnnnnnnnnnnnnnnnnnnnnnnnnnnnnnnnnnnnnnnnnnnnnnnnnnnnnnnnnnnnnnnnnnnnnnnnnnnnnnnnnnnnnnnnnnnnnnnnnnnnnnnnnnnnnnnnnnnnnnnnnnnnnnnnnnnnnnnnnnnnnnnnnnnnnnnnnnnnnnnnnnnnnnnnnnnnnnnnnnnnnnnnnnnnnnnnnnnnnnnnnnnnnnnnnnnnnnnnnnnnnnnnnnnnnnnnnnnnnnnnnnnnnnnnnnnnnnnnnnnnnnnnnnnnnnnnnnnnnnnnnnnnnnnnnnnnnnnnnnnnnnnnnnnnnnnnnnnnnnnnnnnnnnnnnnnnnnnnnnnnnnnnnnnnnnnnnnnnnnnnnnnnnnnnnnnnnnnnnnnnnnnnnnnnnnnnnnnnnnnnnnnnnnnnnnnnnnnnnnnnnnnnnnnnnnnnnnnnnnnnnnnnnnnnnnnnnnnnnnnnnnnnnnnnnnnnnnnnnnnnnnnnnnnnnnnnnnnnnnnnnnnnnnnnnnnnnnnnnnnnnnnnnnnnnnnnnnnnnnnnnnnnnnnnnnnnnnnnnnnnnnnnnnnnnnnnnnnnnnnnnnnnnnnnnnnnnnnnnnnnnnnnnnnnnnnnnnnnnnnnnnnnnnnnnnnnnnnnnnnnnnnnnnnnnnnnnnnnnnnnnnnnnnnnnnnnnnnnnnnnnnnnnnnnnnnnnnnnnnnnnnnnnnnnnnnnnnnnnnnnnnnnnnnnnnnnnnnnnnnnnnnnnnnnnnnnnnnnnnnnnnnnnnnnnnnnnnnnnnnnnnnnnnnnnnnnnnnnnnnnnnnnnnnnnnnnnnnnnnnnnnnnnnnnnnnnnnnnnnnnnnnnnnnnnnnnnnnnnnnnnnnnnnnnnnnnnnnnnnnnnnnnnnnnnnnnnnnnnnnnnnnnnnnnnnnnnnnnnnnnnnnnnnnnnnnnnnnnnnnnnnnnnnnnnnnnnnnnnnnnnnnnnnnnnnnnnnnnnnnnnnnnnnnnnnnnnnnnnnnnnnnnnnnnnnnnnnnnnnnnnnnnnnnnnnnnnnnnnnnnnnnnnnnnnnnnnnnnnnnnnnnnnnnnnnnnnnnnnnnnnnnnnnnnnnnnnnnnnnnnnnnnnnnnnnnnnnnnnnnnnnnnnnnnnnnnnnnnnnnnnnnnnnnnnnnnnnnnnnnnnnnnnnnnnnnnnnnnnnnnnnnnnnnnnnnnnnnnnnnnnnnnnnnnnnnnnnnnnnnnnnnnnnnnnnnnnnnnnnnnnnnnnnnnnnnnnnnnnnnnnnnnnnnnnnnnnnnnnnnnnnnnnnnnnnnnnnnnnnnnnnnnnnnnnnnnnnnnnnnnnnnnnnnnnnnnnnnnnnnnnnnnnnnnnnnnnnnnnnnnnnnnnnnnnnnnnnnnnnnnnnnnnnnnnnnnnnnnnnnnnnnnnnnnnnnnnnnnnnnnnnnnnnnnnnnnnnnnnnnnnnnnnnnnnnnnnnnnnnnnnnnnnnnnnnnnnnnnnnnnnnnnnnnnnnnnnnnnnnnnnnnnnnnnnnnnnnnnnnnnnnnnnnnnnnnnnnnnnnnnnnnnnnnnnnnnnnnnnnnnnnnnnnnnnnnnnnnnnnnnnnnnnnnnnnnnnnnnnnnnnnnnnnnnnnnnnnnnnnnnnnnnnnnnnnnnnnnnnnnnnnnnnnnnnnnnnnnnnnnnnnnnnnnnnnnnnnnnnnnnnnnnnnnnnnnnnnnnnnnnnnnnnnnnnnnnnnnnnnnnnnnnnnnnnnnnnnnnnnnnnnnnnnnnnnnnnnnnnnnnnnnnnnnnnnnnnnnnnnnnnnnnnnnnnnnnnnnnnnnnnnnnnnnnnnnnnnnnnnnnnnnnnnnnnnnnnnnnnnnnnnnnnnnnnnnnnnnnnnnnnnnnnnnnnnnnnnnnnnnnnnnnnnnnnnnnnnnnnnnnnnnnnnnnnnnnnnnnnnnnnnnnnnnnnnnnnnnnnnnnnnnnnnnnnnnnnnnnnnnnnnnnnnnnnnnnnnnnnnnnnnnnnnnnnnnnnnnnnnnnnnnnnnnnnnnnnnnnnnnnnnnnnnnnnnnnnnnnnnnnnnnnnnnnnnnnnnnnnnnnnnnnnnnnnnnnnnnnnnnnnnnnnnnnnnnnnnnnnnnnnnnnnnnnnnnnnnnnnnnnnnnnnnnnnnnnnnnnnnnnnnnnnnnnnnnnnnnnnnnnnnnnnnnnnnnnnnnnnnnnnnnnnnnnnnnnnnnnnnnnnnnnnnnnnnnnnnnnnnnnnnnnnnnnnnnnnnnnnnnnnnnnnnnnnnnnnnnnnnnnnnnnnnnnnnnnnnnnnnnnnnnnnnnnnnnnnnnnnnnnnnnnnnnnnnnnnnnnnnnnnnnnnnnnnnnnnnnnnnnnnnnnnnnnnnnnnnnnnnnnnnnnnnnnnnnnnnnnnnnnnnnnnnnnnnnnnnnnnnnnnnnnnnnnnnnnnnnnnnnnnnnnnnnnnnnnnnnnnnnnnnnnnnnnnnnnnnnnnnnnnnnnnnnnnnnnnnnnnnnnnnnnnnnnnnnnnnnnnnnnnnnnnnnnnnnnnnnnnnnnnnnnnnnnnnnnnnnnnnnnnnnnnnnnnnnnnnnnnnnnnnnnnnnnnnnnnnnnnnnnnnnnnnnnnnnnnnnnnnnnnnnnnnnnnnnnnnnnnnnnnnnnnnnnnnnnnnnnnnnnnnnnnnnnnnnnnnnnnnnnnnnnnnnnnnnnnnnnnnnnnnnnnnnnnnnnnnnnnnnnnnnnnnnnnnnnnnnnnnnnnnnnnnnnnnnnnnnnnnnnnnnnnnnnnnnnnnnnnnnnnnnnnnnnnnnnnnnnnnnnnnnnnnnnnnnnnnnnnnnnnnnnnnnnnnnnnnnnnnnnnnnnnnnnnnnnnnnnnnnnnnnnnnnnnnnnnnnnnnnnnnnnnnnnnnnnnnnnnnnnnnnnnnnnnnnnnnnnnnnnnnnnnnnnnnnnnnnnnnnnnnnnnnnnnnnnnnnnnnnnnnnnnnnnnnnnnnnnnnnnnnnnnnnnnnnnnnnnnnnnnnnnnnnnnnnnnnnnnnnnnnnnnnnnnnnnnnnnnnnnnnnnnnnnnnnnnnnnnnnnnnnnnnnnnnnnnnnnnnnnnnnnnnnnnnnnnnnnnnnnnnnnnnnnnnnnnnnnnnnnnnnnnnnnnnnnnnnnnnnnnnnnnnnnnnnnnnnnnnnnnnnnnnnnnnnnnnnnnnnnnnnnnnnnnnnnnnnnnnnnnnnnnnnnnnnnnnnnnnnnnnnnnnnnnnnnnnnnnnnnnnnnnnnnnnnnnnnnnnnnnnnnnnnnnnnnnnnnnnnnnnnnnnnnnnnnnnnnnnnnnnnnnnnnnnnnnnnnnnnnnnnnnnnnnnnnnnnnnnnnnnnnnnnnnnnnnnnnnnnnnnnnnnnnnnnnnnnnnnnnnnnnnnnnnnnnnnnnnnnnnnnnnnnnnnnnnnnnnnnnnnnnnnnnnnnnnnnnnnnnnnnnnnnnnnnnnnnnnnnnnnnnnnnnnnnnnnnnnnnnnnnnnnnnnnnnnnnnnnnnnnnnnnnnnnnnnnnnnnnnnnnnnnnnnnnnnnnnnnnnnnnnnnnnnnnnnnnnnnnnnnnnnnnnnnnnnnnnnnnnnnnnnnnnnnnnnnnnnnnnnnnnnnnnnnnnnnnnnnnnnnnnnnnnnnnnnnnnnnnnnnnnnnnnnnnnnnnnnnnnnnnnnnnnnnnnnnnnnnnnnnnnnnnnnnnnnnnnnnnnnnnnnnnnnnnnnnnnnnnnnnnnnnnnnnnnnnnnnnnnnnnnnnnnnnnnnnnnnnnnnnnnnnnnnnnnnnnnnnnnnnnnnnnnnnnnnnnnnnnnnnnnnnnnnnnnnnnnnnnnnnnnnnnnnnnnnnnnnnnnnnnnnnnnnnnnnnnnnnnnnnnnnnnnnnnnnnnnnnnnnnnnnnnnnnnnnnnnnnnnnnnnnnnnnnnnnnnnnnnnnnnnnnnnnnnnnnnnnnnnnnnnnnnnnnnnnnnnnnnnnnnnnnnnnnnnnnnnnnnnnnnnnnnnnnnnnnnnnnnnnnnnnnnnnnnnnnnnnnnnnnnnnnnnnnnnnnnnnnnnnnnnnnnnnnnnnnnnnnnnnnnnnnnnnnnnnnnnnnnnnnnnnnnnnnnnnnnnnnnnnnnnnnnnnnnnnnnnnnnnnnnnnnnnnnnnnnnnnnnnnnnnnnnnnnnnnnnnnnnnnnnnnnnnnnnnnnnnnnnnnnnnnnnnnnnnnnnnnnnnnnnnnnnnnnnnnnnnnnnnnnnnnnnnnnnnnnnnnnnnnnnnnnnnnnnnnnnnnnnnnnnnnnnnnnnnnnnnnnnnnnnnnnnnnnnnnnnnnnnnnnnnnnnnnnnnnnnnnnnnnnnnnnnnnnnnnnnnnnnnnnnnnnnnnnnnnnnnnnnnnnnnnnnnnnnnnnnnnnnnnnnnnnnnnnnnnnnnnnnnnnnnnnnnnnnnnnnnnnnnnnnnnnnnnnnnnnnnnnnnnnnnnnnnnnnnnnnnnnnnnnnnnnnnnnnnnnnnnnnnnnnnnnnnnnnnnnnnnnnnnnnnnnnnnnnnnnnnnnnnnnnnnnnnnnnnnnnnnnnnnnnnnnnnnnnnnnnnnnnnnnnnnnnnnnnnnnnnnnnnnnnnnnnnnnnnnnnnnnnnnnnnnnnnnnnnnnnnnnnnnnnnnnnnnnnnnnnnnnnnnnnnnnnnnnnnnnnnnnnnnnnnnnnnnnnnnnnnnnnnnnnnnnnnnnnnnnnnnnnnnnnnnnnnnnnnnnnnnnnnnnnnnnnnnnnnnnnnnnnnnnnnnnnnnnnnnnnnnnnnnnnnnnnnnnnnnnnnnnnnnnnnnnnnnnnnnnnnnnnnnnnnnnnnnnnnnnnnnnnnnnnnnnnnnnnnnnnnnnnnnnnnnnnnnnnnnnnnnnnnnnnnnnnnnnnnnnnnnnnnnnnnnnnnnnnnnnnnnnnnnnnnnnnnnnnnnnnnnnnnnnnnnnnnnnnnnnnnnnnnnnnnnnnnnnnnnnnnnnnnnnnnnnnnnnnnnnnnnnnnnnnnnnnnnnnnnnnnnnnnnnnnnnnnnnnnnnnnnnnnnnnnnnnnnnnnnnnnnnnnnnnnnnnnnnnnnnnnnnnnnnnnnnnnnnnnnnnnnnnnnnnnnnnnnnnnnnnnnnnnnnnnnnnnnnnnnnnnnnnnnnnnnnnnnnnnnnnnnnnnnnnnnnnnnnnnnnnnnnnnnnnnnnnnnnnnnnnnnnnnnnnnnnnnnnnnnnnnnnnnnnnnnnnnnnnnnnnnnnnnnnnnnnnnnnnnnnnnnnnnnnnnnnnnnnnnnnnnnnnnnnnnnnnnnnnnnnnnnnnnnnnnnnnnnnnnnnnnnnnnnnnnnnnnnnnnnnnnnnnnnnnnnnnnnnnnnnnnnnnnnnnnnnnnnnnnnnnnnnnnnnnnnnnnnnnnnnnnnnnnnnnnnnnnnnnnnnnnnnnnnnnnnnnnnnnnnnnnnnnnnnnnnnnnnnnnnnnnnnnnnnnnnnnnnnnnnnnnnnnnnnnnnnnnnnnnnnnnnnnnnnnnnnnnnnnnnnnnnnnnnnnnnnnnnnnnnnnnnnnnnnnnnnnnnnnnnnnnnnnnnnnnnnnnnnnnnnnnnnnnnnnnnnnnnnnnnnnnnnnnnnnnnnnnnnnnnnnnnnnnnnnnnnnnnnnnnnnnnnnnnnnnnnnnnnnnnnnnnnnnnnnnnnnnnnnnnnnnnnnnnnnnnnnnnnnnnnnnnnnnnnnnnnnnnnnnnnnnnnnnnnnnnnnnnnnnnnnnnnnnnnnnnnnnnnnnnnnnnnnnnnnnnnnnnnnnnnnnnnnnnnnnnnnnnnnnnnnnnnnnnnnnnnnnnnnnnnnnnnnnnnnnnnnnnnnnnnnnnnnnnnnnnnnnnnnnnnnnnnnnnnnnnnnnnnnnnnnnnnnnnnnnnnnnnnnnnnnnnnnnnnnnnnnnnnnnnnnnnnnnnnnnnnnnnnnnnnnnnnnnnnnnnnnnnnnnnnnnnnnnnnnnnnnnnnnnnnnnnnnnnnnnnnnnnnnnnnnnnnnnnnnnnnnnnnnnnnnnnnnnnnnnnnnnnnnnnnnnnnnnnnnnnnnnnnnnnnnnnnnnnnnnnnnnnnnnnnnnnnnnnnnnnnnnnnnnnnnnnnnnnnnnnnnnnnnnnnnnnnnnnnnnnnnnnnnnnnnnnnnnnnnnnnnnnnnnnnnnnnnnnnnnnnnnnnnnnnnnnnnnnnnnnnnnnnnnnnnnnnnnnnnnnnnnnnnnnnnnnnnnnnnnnnnnnnnnnnnnnnnnnnnnnnnnnnnnnnnnnnnnnnnnnnnnnnnnnnnnnnnnnnnnnnnnnnnnnnnnnnnnnnnnnnnnnnnnnnnnnnnnnnnnnnnnnnnnnnnnnnnnnnnnnnnnnnnnnnnnnnnnnnnnnnnnnnnnnnnnnnnnnnnnnnnnnnnnnnnnnnnnnnnnnnnnnnnnnnnnnnnnnnnnnnnnnnnnnnnnnnnnnnnnnnnnnnnnnnnnnnnnnnnnnnnnnnnnnnnnnnnnnnnnnnnnnnnnnnnnnnnnnnnnnnnnnnnnnnnnnnnnnnnnnnnnnnnnnnnnnnnnnnnnnnnnnnnnnnnnnnnnnnnnnnnnnnnnnnnnnnnnnnnnnnnnnnnnnnnnnnnnnnnnnnnnnnnnnnnnnnnnnnnnnnnnnnnnnnnnnnnnnnnnnnnnnnnnnnnnnnnnnnnnnnnnnnnnnnnnnnnnnnnnnnnnnnnnnnnnnnnnnnnnnnnnnnnnnnnnnnnnnnnnnnnnnnnnnnnnnnnnnnnnnnnnnnnnnnnnnnnnnnnnnnnnnnnnnnnnnnnnnnnnnnnnnnnnnnnnnnnnnnnnnnnnnnnnnnnnnnnnnnnnnnnnnnnnnnnnnnnnnnnnnnnnnnnnnnnnnnnnnnnnnnnnnnnnnnnnnnnnnnnnnnnnnnnnnnnnnnnnnnnnnnnnnnnnnnnnnnnnnnnnnnnnnnnnnnnnnnnnnnnnnnnnnnnnnnnnnnnnnnnnnnnnnnnnnnnnnnnnnnnnnnnnnnnnnnnnnnnnnnnnnnnnnnnnnnnnnnnnnnnnnnnnnnnnnnaaacctcatagatccactcccaccaaacctgggcttttcactttcaacccagcaactgaaaatgccagttcaaacaacttgctgtttttttctaccccacttgcttttagagttccttctgcctgttttattggctccatataacctgaataccacttatttcttaaagcatagctcagatgctattttaaaaggagcccaggatagtggctgatttgatagaatctatacccagattacccagggtcaagtcccagctctggtacctgcggcctttaaaaccacgaaaaaattactttaatctctgtgtctccatttcctcatttgtgaaatggttatcattatagcacgtcccttacagccttgttatgagacttaggcaatagccactagtgcttagaacaaagctatttttgtaactttctccaggaacacttcccttaacagaaccaacccctccacccctcagtttgttcttccctccacaccctctaacattctaacataaccacaaagagtcctgatgggatttggagttacactgcctgggttcgaatctcaattccgccactgccattcgcgcgttttctattgccagccaccttactctcccctggcctcagtttcctcatccttagaaggggagcagagcacatggtggtaactccctgcacattcctctctttccttgtattgggtgcccagtttgtgccctcacatggcgctagcactgagtgggctcaaactctgtacgcgtttactaagcatattgactgaagaaatctggaaacctagtaccgcggcaccatatcgttaccccaaaggaaaatgcatgcacgctgtcagagatgacgaacactgcgtctggaaacttcttaagggcacccacgtgtcctcagctgcagacagcagcgaggagacacccagggaattcgagacagcggaaggcggaagggtcccgcaacaacccaccctccagctcaggtgagttcagagtgagaacgcaccgccaggcttggacaaaggcacccggcctacaccccagcggctccccgccggggcctacgtggacttcagcctccagccacagggacaagagctgctggccagggctgcccgcctgggctcactgcgcctgcgcagtgagcagcgcgccccaggtcttctgcccgggcccactgcgcctgcgcacggagtagtgcactctcgtcggcggcaccggcccactgcgcctgagcacgtagcggtgcatttcgggacctgtagttttccccggcaggacggtagaagtcgtggtttgtgcgcggccaggcgctggagcctccgctgccgggagcagtaagtgtgtgacgtcggggtagaagggagtgacccaaattccaaaagctctttgggatgctgcgatgtcgcggccggccccgcgctcgggttttccctcctagacaaaagtctgccggctcccggtcgcgccgggtcggggatccggaaggtgaaggccgccaggccccacctgcggggcgcccctgctggacctggccgtcgggcgccgtcaacccgttgagcagcgtgttccggctggcacgtggcccgggcggggcccaggattggttcaagcctacggtgttggtccccggagagtctagggagacaagcaatcccctggaatggtgggggaagcgatgacagcccctggtcctcatccgcagctctgggggaagtcggggggtggggagggcgggtgttgctccctgagtgttgggggaagggtatggggagaggaccctgaactagcccccaggttacccaggaggagctgaggcccagagaggttcagcgactcgcccagggttgcacagcgagcacaggcaccgacgtcgccctccgaggcctgggcttccagcagggagagacccggacacctgtcatcgcttctcggtggatccctgaaatgttgagttgtggagtctgggcagctgagatcgggcagggctggtttcttgtaggcccaggcttccgtgtagagggccaagtgatgcccaaggttcacctggcagccccctctctggacctacccctccttatgattgggtgaagggttgggtgaaaagggtagaggccgggaatgagaacagcttcagaaagctcagacaaagggcgcagcatgattcgtggctggaaggagacagcaagcgatagactgatccttgaatttgttagtgtgccaagaagaaaaagtattaatagattgtggacgacacattatccatattgctttagttggtctaaccaaaataagcgaatagcttttttgtttctaagagaaacctgacaaaggaagacagggtatttttgcggtgaaggaaatagaaatatttggagttgtatctaagccacttgttacttttgtgttttaagctaagatcatggataggtccagggaaagttaaaaatttcccgcacttcttagattttatgcccctcaaaaacatccccaccttgttggcttttgcagttcaaccttcagataccagctccctcgtttctaatattgcattaggtgtacatatggcagcagagcaaatagcttactgatacttttagcttttttcttctcatttgcaaaagactctatgaaaatggctggcttgggcatgtaattgaagggaggtggggaaaagtggtaattcagaggcagtgggtgggaatgagcaaagcatgtcagtgtggttcaccctcttgactcccacctcaccacagcccttctgctacaattgcagattgactctaaatatgtttctttcctaaagagcttgaattttatcactccaggtatgaagttgaggcagctgccagtatattttggcagtcaggttctgtgatatcagagaggatggtgaattgtgaattccagagttgcagaattgttctttagattctgattttttaaatgacagcactttggtttggagggttaatgacttaccccaggtcatatgccacaccatgggtaacaccaagagtagagctcagatctccagttgtcctggtcctcaggctactgatctttattccctgccctgctatcttggaatgactgcattttgccctggatgtcgctagcctgtatccttcaggttggcatgtccagtcatggaaggagagagatttaacataacaacaatggctgacattcagtgctttctgtgtgctggccatggtgcttagtgtttacagtctaatctgcaagagaatttacagatgggcaagttgaggctgagagaggccaagtaacttgtccaaggtcacactgctagtgaacatagcacatgttttccagagggccagaccactggatgttttttcattcatttcctcctgtaggatcgttggacctatttctcgttcttgactttgggaatcaatattctacgtacatcaattcactgggtatgcagttttgcctctgaaaattttgagggaacagccagactcatctactgtatttgtatacaactcaattaaagcaggaattgtaaaaataaaatttgtaagatctttaacattttaatatacaacattagctaatcactaagattactagagatactcaaagtgaaaattgtagcaacaggttataacatgttaggagcatatttctttagggcagtcagaatctgctgcttcttaaagacaagtgggccatttacacatgaaggtaacaagcacattcagccaccatcattatagttaaacagatctatgatttaaattcctatcgctaccttatctgactttgaaaaagtcatggggaaaacttggctaccttgtgccaactgctagcttgttttcaagatattataatcttgaatagatggaggatgaactttttatacttagatagctttgtaattgaaagtttgtataaaaacatcttgcctgaagttcatcttatccccattctatctaaaggcctttgaaattttcagccacttttcttaattatgacggtaagtacatttcaagagaagtgtttccctgacttttgaatgcaaagctctctgcctgtgtcaggatggtgccgaggttaaagccctggagccagactggatgggttcgaatcccaggcccacctgcgagaccctcgatgtgttacttaaattttatttcctcctctctaaagtggaggcagtaagctgttttatggggtagttgtgagggctaaatgtcttaactcatctaagcactttagccacttttttccatctgacacaaaaaagttaagctatgattattgtgctataaagcattggatttcagaagaagtaggggcactaaacaccatctgcttgacacctttcttcacttacagatgggactgaagctctagagggaagtcacttaccagagggtgtaggttcttcatccagagctgaagtcttcttggggttatgtgtcatattctaagagtagggacctacaaggccttggagcgaatcccaaggctcgggctgccagccctgccttctcatttccatatgccatggtgtggcatatgacctggggtaatatcctctgaaccaaagtgctgtcatttaaaaaatcagaatctaaagaacaattctgcaactctggaattcacaattcaccatcctctctgatatcacttccttccctaccttctactaggtctccctcaagctttagagaaaattctgcctctgaattattgcatctgacaatttttctgccctgtcacttattcccttgctcccagataatcttcgaaaaaccaagatgagtttaattaacactcagaggacttgacaaagacactcactcccaaaccagcttgcgtttaggtctggaggcaggtggagggacagattttagacttgggcccttaggttcacagatgaatgggatgggagcccatgtcccctcagaagcggcgctgtgctgctggcggctacagacagctggtgaggagagctttctgcttagcaagggccaggcccgtctgggccctcgcccagcccatccacttcccaccagtctctcaatcgccttgtcaggacacagcccacctctctgtggagctcactttctgttcacattccctctctccatcaaagagacatctttctaaggtggtctgccctaggaactccaaattgacctgcttctttcttcctgcccagatcagaccttccagctgcctctcatgtacttgtctgttgggggcttgtgttgatcaggagtgaattcacagtctaccatgaattggaaggtgagtatcgttttaaatatttatggcttggggttttttcttcctcctgattgtgaaaattcagaataacagttctacaccagtagcttgattaaaaagaaaaagtaggtgaaagcataatatttatgtttcattttaagttaaaacataaatgtacatttattcgctggacttctggaagaaggccaggccttttcttcgagtgtgcattcactaacttcaaatcttcctcacttttcttacaaaaactatacctttaaagctttacctgcaattttgcattgtgctttctttttttacacattttttttgtagagatagggctccactatgttgcccaggctggtcttgaactcctgggctcaagcagtcctcctgcctgagcctcccaaagtgtcgggattacaagaatgaaccactgtgctcaggccgttttggttcctttaaagtagatgcagtggactgaatgtttgtgtttccccaagttcatatgttgcaaccgtagtgcccagtgtgatgatatttggagttggagcttgtaagaggtaattaggtgatgaggctggagccctaatgtttggaatagtgagcttattaaaagggctccagggagctctcttaccctctttctgccatgttgggggtacaacaagaagccagccgtcagcagcctggaagaggactccgctagaacccccctgtactgcgccctgatcctcaggctttcagcctttcgaactgtgacaagtacctctttaataagtcacccagtctgtggtcctttgttctaggagctgaattgactaagacagtggattaagatcttatgagcagtgcatacacaaaatctttccagtgtttcatactctttcctaatcttttacagttgacttgccaacagcattttttttccaacgcaaacttgagtctttcaaagtattcaacttagttttcataaaaacttttgctttacacagtcatatttcacaagcgtaatgtttaaataagttatggaacatagtatcaagtacaacttaaataaactgcttggcgagtaaacacacctgacccctgtgaaacattagattcagctggtgggagcagaagttcaagggcagccagagagtaggtcagcaatcaggttccaccgagggaaaggagaatgtcatcttaagtcccggaagtcaataaggtgaggtggaggttgtttaagagagcagccactaaaatatattatagtcactttgcaaagtctaatatcaagcaaaaatcatacattgtctcaccatctagaaatggctactattaacaatctcggtatattcatctttttctgtatatatgtgtggcgtgttttcatgcataggatcttattttacgtgttttttcaattattataagcattttcttcaaaacatccagtggttttctattgcaaggagaaactggaaaggtctggaagcaggatcagggagccaggaaggtagctttcccatcttccccagctgtgtggggtgaggggctcggcaggccctgcaggagggctgagggcccaggaacttgtgtaagttaaagatggcagagtgagtgagctgtgaagggtgggaagatatagaacagtttgtttagcatgccttgaggatcagagctcacagtggaaaggttgggaaggaaagaagaggcagtgagaggatggagaggggaaggagcggaaagcagtgtggggtgaggtttagggaggtcattcgcccactgcagtggctaagtcagtagaggagagaggcagtaactggtactaagggccagggttcaaagcattaaacctcatgcctcaaggtggtgtttctcactcctgagcactagttaaggcaaggatttcgagccccactcccagagtttctgattgggtagatctggctggggcctgagaatttgcacttcttataagttccaggcggtgctggtgcacactggtcgaaggcaatgcgtgggaagttttcctctttaattgtagagtgacaccaacccatgtgaccactcgggccagtcttgcttgtgacagttttttctgccatcaggaacaaagtctgcccaaaccttcccagcttctgcaccagggaagtggctaccagggagcagcttcgtgtttaaacacagccccatctcgtgtagtgttagaaaggaatggccgcaggccgggcgtggtggctcatgcctgtaatcccagcactttgggaggccgaggcaggcagatcactttgagctcaggagtttgagaccagcctggacaatgtggcgaaaccccgtctctacaaaaaaatacaaagattagctgggcatggagatgcgtacgtgtagtcccagctactcgggaagctgaggctggagaattgcttgagcctgggaagtggaggttgcagtgagccgagatcatgcccctgcactccagcctgggcgacagagtgagaccctgtctcaaaagaaaaaaaaaagaaagacagtcatggccctgattgcagagagctgcagaaggtggaaggttcagtagcccccagtgcgtctggtggccttccccctctggctcagtgggccatggccggcagcgacagtcaacagtgctacctgtgcgttagcaacaagtatggcctcattatttaaaaacttagttattcccatttcacagatattggggttttgtttttaaaaattgatgtagatctaggccaggcatggtggctcacccctgtaatcctagcactttgggaggctgaggtgggcagatcacatgaacccaggagttcagcaccagcctgggcaacatagtgggaccccagctctacaaaaaatcagaaaaaattagctgggcgtggtgtcatgtgtctgtagtcccgtctactcgggaggctgaggtgggaggattgcttgagcctgggaggtcagggctgtgggaagccgtgatcatgccactgtactccagcctagttggagtctcaaaaaaatattcatatagatccagtccaccctggcagcattcattttcctccctgaaggtctgtatgtttcaagagatgtaaggggtttgttaaaaggaaattggaggaaggggtttcataccactgaaggttagtgcctaagagaggggcaggaagggggccctggagctcttcgctttaccctgtgaatgttcttgacctctgctgcccttgtgctgcgtccttctcagtccacacttctgcctcttgccgtgcgtctccactgcctgtaaaacaaagtgaacactgaagcctcccactagggtccattggctgatgcgtttccatttccatgggttttctaacttctggatgagagagtacattcctgcaattgctaaagctaagtttcctatctggattgtagacagctatgggcagtaacatgggctttgttatattagtaatagggccccggccaggtgcagtggctcacacctgtaatcctagcactttgggaggccgaggtgggcggatcacgaggtcgggagttggagaccagccggccaacatggtgaaaccctgtctctactaaaaatacaaaaaattagctgggcatgatgccgcatgcctgtaatcccagctacttgggaggctgaggcaggagaattgcttgaacccaggaggtggaggttgcagtgagctgagatggtgccattgcactccagcctgggtgacagagcaagactctgtctcgagaaaaataataataataatagggccccataggtttattcagagagactgagaaagctggaagagattagcttttcccagtgtgagtcattgcctcaggtagcctggaaaatcctagcaaacaaaaagaagtttatacaacaacattcttttcatagctggtttgtatgcatggcgtcaaaccttcacctctaaaatgtgaaccttcaagaaaacaggatttcagggtttactggagggaggggattagcctaggtctgagggaagaagaacctggaaatgaagtcagtgtttaaagctccttatatttaccagagtaaaaagttgaaaagtttcacttttggaactttttagtcttttgtactgatgccagagtgatctttctgaagtgtatgtgttgtgcttattctttactgttaaaacgatatcatggttgaaaactattagctaattactgagtgttcttgtgttcttactgttttagtaaaattaaaacgatttaagtatttgcgtccctgcctcctcccatgattttcattgtatttctatcatatcatgctatatccttctgcaaatatccatacataaccagttaaatgatttcagaggtagcgagtctagttgcctctggaaaattcagtagccaagccatagtgtatttgcatattgtaaatgtgaagtggatgggtgtgaggaatgaatcatatatagtacaggacagcgtgatgctacagagttgggctttggagcatttggagctgggtcaggccctgcctcgctgactgctggcctccccgcctctgcattttctcggctccaccgcagtcagggcgagccatctgctcatggaggtggctaagggcagaagggaaagccgcataaggcactttgcatgccgtgagttcccagtctacagcagctgatgctacagcttctaagcgtgaaatccacatctagttctgagtcataaagagtttcgatacaatcataggaacattcatctacatacactgtgatttcatgaatttcagtttgttgaaaatcaggcatcagtggaagggagactggccccggggttagaatgtccttccaactggctcctcatgagggagctgtgggaccttcaacctctcaacctccaggagctcttctttccttgctcatataaccagggggttgagtaggtccccttgaaagttatttccagccccccggttctgtgagcatattgtacacactaactaggttcagatcaacttcggttagactattagagggaggtgcacatgtatcccccacagtggaatctcattggtatttcatataataagtgattgacagaaataaggatttcattgggataaaatcctacctggtcctctaaaataatgattgctcaaccagagcataccttttcactatttgggagggaatttttaatcacacaaaaagcacatacatatcattcaggtcatgctaaccatgtgtatggaactaatatttgctttgaagtactatttgcaatatatagaatttcacacaaaaaacctactagtgcaaagagtgagtaattcaaatgcatagtgtttccctagactttattttagtgaatggggttgcaagagcagttagtaagtagccatgttttaatgttttgagttctgtcgtgttttattttaccagcaagtgccagtgctagtgagtctctagaaacaagagaaaatcccagagtactaaagctgcagtttccagaagcaaggtctgattcacccttactttgtagatgaaggggcaggagctcagaaagaaaggagctcattgcctgacccaggtcacacggtcagtcggtggtaaagtagagctctgacccaggcctccgggctccagctcctttcactggatctggctgctgcctcagaagcaagggcctgggtgatcagcaggttgcacggttgagctgtgagagaccagagtccccacgcctgtggatgaccggtggtcccctccatgaagccagccgcaagcaagcagcaaagagcagagctgtaacttgactgttggccccatggggatagagaccttttctgcttggtctccagtgtagctccagccccctatcctcgtgcctgttgcagaataggtgctaagtaaatatttgttgactgaaggatcataaaagaaacctcccatatcggtgatggaacatttagttagcatggcttctttcttcttgaaggttcttgagcacgtgcccctgctgctgtatatcttggcagcaaaaacattaattctctgcctgacatttgctggggtgaaaatgtatcaaagaaaaaggttggaggcaaaacaacaaaaactggaggctgaaaggaagaagcaatcagagaaaaaagataactgaaggtgagtccacagtacccaaccttgcaaatgggagctggccagtgggttggggtgaccaatcaatgaacaagagaggtctgagacctccctgtccgtcgggtctgaagggctgcgtgggggcatgtggcctcacctgttctctaaggtagaactgctccataaagggccaggtgtgcagatcctggtcctgggatgtgagtgctgctgagccaaggtgcacggagcattagttcatccttcttgaaacctgcggtggcaatggttcttgacaggtattgggttaagaattgaggactcagtgacagctgtggaccttcttcccagagaagcacacatactgaaaccatctgcatttgtgtgtggggagaagtttgcagatgtggggagtcacaggtcatttgaaattccaagattaagaaaccctgttacctttaagataaagtctgactccatggtatgacaaataaatcccttcccagtctggtcttaacccagacctcatttgccacatgtgcccactccccatccccctgcaggccattcctcagccaccatggcctttggccttgcttattaggttcttcccaaggacctcctcaccaggcctgagggtacactcatcgttgtcacccagtgcctatcacagtgcacactggtgggcttagaacacacttggggagttacaatacatcaaggcaccagaaagttcctgttaagcccctgttacagatttaacacatgacaattcacagttaccttgattccagtgtgttgatgcagtttcttcactttgcaggttgagttctgtactttaaaaatcaggggattcagccaggtgtggtgactcatgcctgtaatcccagtgctttgggaggcaaaggtgggaggatcacttgagccaatgagttcaagaccagcctgggcaacatagtgaaaccctgtctctacaaaaattaaaaaaaaaaaacaaaaaaaaccaaaaaaaaaaaccaaaaaaaaacttagctgcacacttactgggtgtgtagtcccaactactcaggagactgaggtggaggattgcttgaggcccagaagttcaaggctgcagtgaggcatgatcacaccactgcactccagcctgagtgacagagcgagaccctgtctaaaaaaaaaaaaggattcaaatatggtggcggtggggttctagatctgtggttcccaaacctagctaatgatcagaattgcccaggtgtttgtttaaatgaagattcccaggcttcagcccagagagattccataatggctctggttaggtttgggtgttggtttttgttgttgtttttaagataggggatcctactctgtcatctaggctagagcggtgcagtggcacaatctcggctcactgcagcctcagcctcctgggctcaagcagtcctcccaactcagcctcccgagtaggtaggactacaggagcacgccaccacacccggctaggtttttaaaacaatttttagtagagaaggggtcttgctgtgttgcccaggctggtcttgtactcctgggctcaagcgatactttcgcctcagcctcctgaagtgctgaggttacaggtgtgagccactgtgcccagcctctgttcttttgaaaacccattagataatccttaggttgtcttctcagcaacaggtcattgtaggaaccactgggctaggtggcctcccaaacccagcccactctgagattccatgctgaattcccttgcagtgccgtcaggcttgttgaggctaaagacctactgatgaggaatagtagcaacacctactaagtggttattctgtgctggggactttgctaagcatttcatgcacaactgtgttattcagccctgatgactctgtgaggcatgttcagattgaaagaatggctctctctacatggtgaagaacagagtcagaaattgatcccaggtcaaatgcattcgatcagcatggccaagcccaagctgtgctaccttcctgaatacaggcaagtgagctcgtagggatgcttcactctgttactcaccacttccggcagctgcccactcgctggtccccagtgaactgtaggcttttgctagatagaagaagttactttctttctttctttctttctttctttttttttttttttttaaggtgtttgattgactgaaatttaggagtaggcattacgatggggaggagagaaattaaaaagggtgagggaaggcagtttaaattaaaatgttgctgattgaatttatattcctgacaatcccattttgtgtgctaaactgatcaaaggaagaaaagatgagatggaagatcataaaggctttgttcctcccacaaacatcagcagagacctgcatttaagtcaggcctggatggcttagaagcaactcagggagttggtcttcctctctaggctggcagcttcttaaagactagagacttgcttcaaacaaaaagcgttttcaggccgggcgcggtggctcacgcctgtaatcccagcactttgggaggccgaggcgggtggatcacttgaggtcaggagttcaaggccagcctggccaacatggcgaaaccccatctctactaaaaatacaaaacttagctgggcgtggtggcacgtgccagtaatcccagttacttgggaggccgaggcacgagaatcacttgaacctgggaaacagaggttgcagtgagctgagattgtgccactgcactccaggctgggtgacagagtgagactgtttcaaaaaataaataaataaataaaaggggggtggggtgtttcagatggaagggaaactgatgctaaaaatacattggttaataaatagacttgagtgatagacttgagtggtgtccgcttgttaagtttaaatggctgagcatacgtctttatgctgagcagtaaacatcgggtatactcttatcaaacatttcctactcatccctttggtattcccttctagattctgccatgtaaatgtcagcttgagtggactccagctgagaagaaagagaagaaagacttaattattgaataatttgtcagaggataaactcccaacctagacctttcacttaaaatagtgtgaatttgtatatgtttttaaaagaaccagtactggccgggtatgctggcttttacctgaaatcccagcactttgggaggccgaggcgagtggatcgcctgagatcgggagtttgagaccagcctggccaacatggtaaaatcctgtctctactaaaaatataaaaattagccaggtgtagtggcgcgcgtctgtaatcccagctactcgggaggctgaggcaggagaattgcttgaatccgggaggtggaggttgcagtgagcctaggtcgtgccactgccctccagcctgggtgacagagcgactgcgtctccaaaaaaaaaaaggtaaaattaaaattaaaaaaaataataataaccagtattttgtttactaaaataaaatgcctttgtaaaaaaaggagtcgtggcctttggaataagtcaaattgtgtatctctttctctttctcttacacagcaccctctaccccgtgttgtaaagcggggggttttgtaaacttacacctcccccaccatctcaagctggggggtcccaggtgagaggcttccatagaggacaaggtggtgcagaaacatctgctgtgggagtggggtccccagcactgggtgcttcggccagctacccccgaccccaggccccctcataggctgccctcccataccctcctttctcgtcttttcctcctacaggtgctacacccctgtgagagtgttttggagtgttttcattgttagggtggagggaggctgtgtgtgtccaggaaaggtgactcctgtgttaaccatgagggtcctcgcagggaggaatcgttgggagccctagggtgtgttttgtcctctcctcacctgtttgctccttgggatttgctgatgagaaatgaagggtagggcaccctagtagccactggaaccaagggcagggaggatgggaagatgttttactcagcacctaacacacgcagatccctgtgacaagagctcatgctctcccacttctcgcaagaccccagagtggatggggagtgaggtggcagcagctggcactggaagcagtgcggagtgtttggtctggttgctgatggctgcatgggaaacttgcaggagtgtgtgttagtaaacgtctccccgtcctggcccagtttgtgtcgaacattgcgttttccatgtggggagtcaggggagttccatcttaaattgcactgtgcttgctggatgctcttcaggacaatttaggaagcaggaaagaatttacaaagttctgaggacagacagaccctgctcctacaagctgcagtgctcaccatagtcaaagtggactttcacgtaagcccagacctcattctctctgaaggaggccgctccagcctttgccaggagccctggtgactttattctgcctaatcctgctgcggcctggggtcctgttagaacgtgaatggaagaccacagcagaggtgggatgcccttggatttctgccatccccacgctttcgtgacatgctcagatggggcctagaactgaccctgggccgtggcctaccatcctccctttgtcagggcctccttgcaccctggcaggttaccccacccaccctggcccatgttcctgccccaggggcctggcctctctgctgcccaccctgcaggtgtagggtatcacctgctcctgccttgcctggcatcagacctgctaccttggcaccacttcctccctcatgcccacccgcctgtgtgcctcataagtccaaggcgggggatctgctgaccagtagacactcatgtgctaaacacaagcgcttttctaggctttgggatttaaagctacactttggaatttgtggaagatctggccatcttggaaaattaggtagaaggtgacataaggactggactaaaccactgatcatcccaacagtgcccgtggcttttctgttttttgtttttgcttttgtttttttagagatgaggacgtgctgtgtccctcaggttggagtgcaatggtacaatcatagcttattgcagccttgaactcctgggctcaagcgatcttcccacctcagcctcccgagtagctgggactaggccctgctaatttatttatcttttgtttagagacaagggtcacgctgtactgcccaggctgggtgtaggttttttctgaagagcatttgggagttttgtttttgcttggttacttttcctatgcacccttctaccactagggggagatgattaatcactaattgaagggattttgttcgttttttatgttttgggtttttttgtttgtttgtttgtttgtttcaataaagaaagagtttaattgcagtaaggcaggccgcgcaggagatggcgttcttattcaaatcggtctctctgaaggctcagaggttaggggttttcaaggcggagttcttgctatcattccactccttaggtacatgaagttggtagatgtgtagtttgatgttaaattattgggtggatgcatgcaccgctggttgtagagactggtaaagcccactagcaggaccccacctggaccaaagcaatccctcaacccgctggaccatgaccgagaacaaacacaaaggacctgaaatgcgttgtgaaggccagaagccgacatccacattctccacccacggagagccccagagtccctcatgcacatcctgcttgatctattacacacattcacacattcgcaacacatttgtttggttttcaagcttacaacatattagaaacagaaaggaagaaaggctgtcagcagcagaaatacctttgagcaagagggacggtctttgagaagcagacttgagaactcaccgtgtgctcttcatgcgccagacactgcggcagccacagcgtcccacatgggatgccacacgtgatgatgttatgttcatggtgatgacctcaggcgtgaagaagaggttcagccgtttcacacagtctgtttaacaagcacatacataacacagacatacgtgaggaatctcagaaaccaaataattcaaacaaagagtctgggattctttcaaaagcgttgcctctgcccaagctttcttcaaattctgtctatagggaaacgtagctgtcaatgtctcattcccgaagacttccagatgcctggatctttagagttctccacctcaccccgagttgattacacaaatgttcctggggctttgcttagtgccctgctctgtgccaggccccacaggcagagatggcagggacccaggcctgacgttggagagctcctgacccactgccggaaacacacgcaccatcacaccatgagggagctcccccatgcagatctcatctgtgtcagagtgaagccagaggatggacggtggagagtctagaaggagaagagaaaggaggatgagttctcaaacatgagcaagcaggagaggccatttaaaatgcacactctggcctggtgcagtggctcatgcctgtaatcctagtggaggccgagacaggaggatcacctgaggtcaggagtttgagaccagcctggccaacatggtgaaaccctgtctctactaaaagaaaaccaaaaattagctgggcgtggtggtgcatgcctgtaatcccagctcctcgggaggctgaggcaggagaattgcttgaacccgggaggtggaggttgcagtgagcagacatcgcaccactgcactccagcctgggtaaaagagtgagactctgtgtcaaaaaaaaaaaaaaaaccaacctaaaaaataaaaataaaaataaaatgcagactcctgggctggattccaggtccactgcatcagaacctgcaggagaaggaccaggaatttgtgatacgaacatccccaggcaattcttgaccctccttttgagacctacactgtagaagatgggcagagggagaggcagcaggagcccaacctgggaaggagccatcgggaaaggtgggaggaggggcaggagacagcgcacgcgaggcagcaaatccttcagcccttactccccaagagctcacagctgcctccacagagggtaacggtatcattatccccttttcgcagataaggaaactgaggcagagaggccctgcctaaggtcccccagctggtgggaggcagagacaggaaccagccctcatggtctcactgtgagactggacttttcacagctgtgcggtcgagtctgagccaagtaaagtaaagcgagtttttgtacttcgaagtctgggacataaaatcttcaagacgtcagcatcagtgacacgatggtgacagaggccagcattgcttgttgtatctttttccatcctgttcctatctacacttccattcttctgttcattctgcttgcatttcccacccagatggctttcacggacacacacacacacacacacaccgcacacacacacatcactcacagacgcaccctgtgcccaatgtcaaaagacaaaactgcaacacgtttagtcatagacctcattgtcttttattcttgattcatgaatggggcagcctcccttctataaaacagagcaagagctcccaccggacaattgcagaacagtgggctttgtaaggtggggacaaggaaacagaacaatagaaaagaagctgatgggttaacatcaggttacttcaggacctcctaatcacgctgactcaggtagaccagaagctcctgttttcaggaaaaactaatctgtttggggacctacctgcttccttattaaagttttgggttgattatatggctcttagcatgactgactccattttggtttggtttgatctggtctgttggggcctagtgcaggatctcagtccaaaacaatagcctcccataatttttgtttaatgctgggtcagcggtaggcttggtccacttgcgcttctgcctgggtgggccttcctcttttcctccttttctctctgtggtgaaatccccattcttctttctgtcctccacttcagtttcacctcttcctgcaaccctgcccacagctcttcagcgccaggccctggactcagctctcactacgcaaacctccaacatctcactgagtgggaggtggcccccacctccacaccagacctggaccttgagggtccaggcttgttttccttggtactcctggccctgacgcacccagccaggcacacagaaggtgctccagtatttgatgagtgaatgactggtagcaccagaggaaagggagcagggagtatggccaagaccattagctgccttcctcagtgttccttctccccttctccctagtaatagaaccctgacttttacctggccgtatggtcactcaaaataaaggactacatttcccaccttctctcgcaaccaagcctggccaatcaggtttaagtggaagtgtagtgtgggacttcctggaaggatctttaaaagggacaggatgggcccctcttcctccctttctcctttttggctgcctggaatactaatgcaatcgcttgttccgcagccactttggactaagaggtgagtttgagacctgaaccaaatctaggacaatggagtaaaaagataggatcttgggctctcagtgaccatggatccatcatttcacccctgaactgacaccttgacacttcttatttttggtggtggtggtggggtagcttctattttgttggcatctctgtggtctattcatagttcacctgttttagctgacacatggagccagttagagatgggcgcaagggcttcctgatatgaagacttggattctggtcctgaccctcctgttactactgttacgtacgtggctaggtgagtcggtcaccaccctagcctggcctttgtaaaatgagctcaatgatcactgccctccctactgtacagtgtttgtctgaactgaatgaggtcaagcatgtaaagatggtttgcatgtggcaggacaatcacaaatggaaggagtgtatactacctcggtgggcaactcagccaccagttggccaggcaggggctccatccaacccaattggattgagccaatggccaacgaaccccatttgctaatttacctcttaggtccttgtaggggcagcaccatttcctaatgcacccccaccttgaaagccaccttgatccgtgggagggagaggggctgtgggtattagtgatggggaaggccagagaggctgggatgttccatcagccaaccactcagaaggagaatagtgccaccaacatcaggagctcacttctagtggacatgtctagagatatgtggctcagccctgcgttgctgcgtgtggtcacccgctcttaactaaatacagtgctctaaatatggctgctcccaaagagactgtgggctgtcctcaccagccatcctgtcccacccccaccagaagaaacctcttcttattattaattccctaaccgattgcagatattgcagatggtcttaaaggaaatgccagagaacaaagtttcctctgatcaaagtatcttaagatgtgtccaccctcattagatgccagcgataaaaaggaacaaaaatttttctcaaagagtgaaaaggaaatgagatcagtgatggcaggtctaattgtggacatgtttgcttcgaccttaccatggaccactcactcagtgggtgccagacacaatgcagtggcttggcgcaggttatgtgattttttttttttttttgagatggagtcttgccctgtcacccagtctggagtgcagtggcatgatctcggctcactgcaacctccgcctcccaggttcaagcgattcttctgcctcagcctcctgagtagctgggattacaggcatgtgccaccatgccaggctaatttttgtatttttagtagagatgggtttttgccatgttggccaggctggtctcgaactcccaacctcaaatgatccgcccaccttggcctcctaaagtgttgggattacaggcatgagccactgctcctggccaggttatgtgattttaaagtcccactgtattttattaaggagttgattgagcctcaaggaagtaaagcaacttatccagaacatatagctacgaagctagaaactcaagattccaactaggtccatccaattccaaaagcccggtgaactttctgttactttctatgggaagttttcaggtttagtataaagcaacatttcttaattatgaatacaatcttatgtaaccaaattgcacattaaagggtattccttttgatccttctttcctcttttctaataatttttacaaggcctcaaaggaatagaactctaaatctgttttattaaattgctttagttttcaaacaaaaatagctcctgttggtttatctttagctgataacctaaaaacattccttttttatcgctgtaaaataatgtgtctttaaaggatattctgtctcctctttaattttatgttgaaataaaattttttggtgtccaggggagttggccattttagcggctggtgtctcatctgaggtcagaggtgagtcttgcgacatagaaatgatgggggtgaaaaaggaaaagctcagcttcaataactaagctaagcacggtggtgaggagcatgggcttcagaatctcttggccccagtgccttgccagtgcctcagtttcctcatctgtaaaacaactgacaggattaagagaattaaattataatagctatgcgttagtggcatcatgaagaatggctctaagcatgaattctgggttgaatctctctgggcctcagttttccacatttatttatttatttatttatttatttatttattttgagagggagtcttgctctgtcacccaggctggagtgcagtggcacaatctcggctcactgcaacctccacctccaggattccagtgattctgctgcctcagccccctgagtagctgagattacaagtgcccgccatcacacctgtctaattttcgtattttagtagagatggggtttcaccatgttggttgggctggtctcgaaccccttacctcaaatgatccgcccacctcggccccccaaagttctgggattacaggagtgagccacggtgcccagcacgtgtagctgttggtgcctattattccagaaccgcagaggcatggaataaacgggatgtagggcaaaacccactcatctcccaaaactcaggccacccacacgtgggcctgcacaatgacagcacactgaagtgaccaaggaagtttgagtaccatggtttgctctcaaggaacttaaatcctaaaacgtacatgaaatcctgagggaaaaagacctcacaaatatactacacaataggagttatttcaccaggttaattgccaatgagaaatgcaatgtttctattggcagagcaagacttcctttagcacctgtggctggctgaatagtggccaccaaagatatcaaggtcctattccctggaacctatgaatgtcgctttagatggaaaaagttctgcctatgtgaccaagttaaggattttgagatgtgaagatggttttagattactcaggtgggccctgaatgcaatctcaggtgtccttgtaagagggaggcagagggagatttgacacaggatgagaaagtggtgtggccacaagcccaggaatgccggtggccaccagaagctggaagaggcaagaaacaggtcctccctggagcctctggagagagtgctgccctgccaacagcttgcctttggctgtcttctctgtcctgtcctgtcctatcctttttcttttctttctctctctttttttttgtttttttggagatggagtcttgctctgttgcccgggcaggaatgtgatggtgtgatctcggttcactacaacctctgcctcccaggttcaagtgattctccttcctcagccacccaagaggtggaattacaggcgcccaccaccatgcccagcaaatttttgtatttttagtagagatggagtttcaccatgttggccaggctggtctccaactcctgacctcaagtgctcctccgacctcaggctcccaaagtgctgggattacaggcatgagccactgagccaccgtgcctggcctctttcccttcccgtcccccttcctctttcccttccctttccctcccctgcccccttccccccgccccctccctctcccctgccccctccccctccctctcccctctcctccctcccctctttccttcctccctcccttccctccctcccttccttccttctctctttctttcttctttctttctctctctctctcccctccctctcctccttagcccccctcctttctcccttctctctctttctttttgagacagggtctcactctatcacccaggctggcatgcagtggtgcgatcagagctcactgtagcctcaagctcctaggctcaagcggtcctcctgcctcagcctcccgagtagctgcaaccacagccactacatctggcttaatttctgttgttttaagccaccaagcctgtggtaatttgtttcaacagccacaacaaattaatatagcactgttgactgtcaagtgaggcctgcaacagtggaaactttatagttctgagtggtcagctgtttgaggtgtgattaatctccaggaaaaatgttaccaggattccctttgtaaccatgacaaaatgctgagaagtggtggacacttagttgctgaaaagcactgaacgttcgctttcatctgacaaagtctttctgaataatacagggaggttcgggagggaaagaaggcaagcaaacgatgggatgctttctgcacgtggctgtcaggaaattctgggtagaaattctttctttctccttttcttttctttttgagacagagtctgactctgttacccaggttggagcgcagtgatacaatctctgctcaatacaacctccgcctcccagggctcaagtgattctcccacctcagcctccctagcagctgggaacataggtgtgcgccaccatgcccagcgaattttggtattttttgtagagacgaggtttcaccatgttgctggcctcgaacttctgagctcaagcaatcctttcaccttggccttccaaattgctcgtacaggcataagccactgtgcccagtccagaaatgttcataaattgttttttttcatagaccttattttttagagccattttttagattcatgcagaattgagtgaattgagtgggtgccccaccacccaccaccgctaccaacatcccatgtaagtgtacaaaattttttttttcttttacaggcagggtttcactttgtcacccaggctggagtgtagtggacaaccatagctcactgtagtctcaaacttctggctcaagtgatcctcctccctcagcctcccaagtagctaggactatagatgtatgccactcagcccagctatttttaaatatttttgtagagatgaggtcttgctgtgtttcccaggctggtcttgaactcgtgacctcaagcagtcctcctgcctcggcctcccaaagtgctgggattacaggtgtgagccattgtgcccagccataaattattctttttgcactcctcggaatgattacctctgaaatgactgtctgaatgtacataaccaacagtgaattttatgatatgtttaataggggtagtctttttctataaaaatgaaaaagacaaccacagattcttacaacagacatcggcagcagccccaaacctaaatagggaggtgttgtcccagctgcaagtggctcagctacagggtctcgagatgaaactccacggcacagtctaatgacctgctggaattcctggagttggcggggagattggctggataagtggtctctgcagacccccatgcgtgccacccctttgcccaccatagcccacttgaacccaccactgtcataactttccaggtcctaactgggaccacctactccccttggagggtccggatggagtttcccctctgcggctgcctctcactcatcctccaccactttgccgacaaggaaggaaggacaatcgggaggagggagtcttgcttggcgaccatctggacaatatctcgcccatggcaagctggatccctgtggattactttggtgggtggaaacttggcacactatttaatttgggctttttgggggatgactgcacactggttctctttttttctcagacctaaatttcgaccactcaactttcagcctgctcacccctgcttattgccatccacctttgggctgggttagacctaatcctccccttgacaaagccctcaaagtagccttcacaagataagagtcgagacccctaacttaccaacaaattttaatgaaacttctagtaaactcaaagcgctttgccaacatccttaggagcaacccagttctcgcagcaccccatgtgaggtcgctgttgaagtatctttggctgcagtggtgtggaattcatctcaacagagttgacggtaaagaccagacatgtagcagcctcactgcttgttggaggaaccacccttaagaaaatttcccaagatagtagttttcccatctccgtactttgctagttaatgttctccacttgcttgcgtttatcctttcaattcctttgctaattaaattgctgaaaagtatacattggtaagaatagccactgtcaatggactgcaaacaaaactcgtttctgttattgatgataaaccatttcagagaagaccaggctgagtctaaagggttcagataattacaaggggaaggcagagagagtagttcatggccacaggacttggccacctctgggcaacacataatgcttgctaagctaatgactgtagggatatagaactggccctcagcctctctgtcttcctttggcctctgctcttcctgctgccttctctctttgaccacgatgacacactttccataggccttcctcaccacatcacagaactcagagaagaggctgtcttcttgtttgatacacagctcgtctcttaggaacacccgatatttccaaggcacccatccttgactacccgcagcatgcacaatacaccaagttggggtttgtatgaaatatccatcactaatatcttccccagttacgagactttctgggatattggtttccccaaaatatacggtcttaaatccatcatattgcagtgttctcagggttttcagatattggaggcattgcttcctcttgatgccatcaaattgacttctgataatgacatttcttaaaagagggcttgcaaagcgaggcatggtggcttctcaagtgtttttaaaagcttgcacatctgcatctggggagagatggcaagtgggggatgatgacctcataaagggctttcttacagtggtgccagtcccacacatacacttcagatttcaagcatcatggaataaatactcagaacaactccctgctgacccataaaatatgggaattgcagatgctacccataaaaatgctactttgacatcacttctgcaataggtctgagacagaggttggcaatcttttaatagtaatgagcctacccatttggcttaagatggggagaaatgtttacattcattcatccatttcaaaaatatgtactgatcacctgctgtacaccaggcattgtgccaggcaccaggggtatagtcatgacacacccagggagtcctggacttacgtgttgtgtgtctgtgtatgcatagaatttgtgccagttgccttcccatttgcacaactaagagtgattttttccaggtggcagaaggaaggtatggcaaattgcaaaagaaagtcagtctgcacacctagcttccactggcgcttgcaggtctttttttttttttttttttttttttttttctgagagggagtctctctctgttgcccaggctggagtgcagtggcacgatctcggctcactgcaacttccgcctcccgggttcaagtgattctcctgcctcagcctcccgagtagctgggactacaggcaccttccaccatggccggctaattatttgtatttttagtagagatggggtttcaccgtgttagtcaggatggtctcgatctcctgaccttgtgatccgcccgcctcggcctcccaaagtgctgggattacagatgtgagccactgcgcccacccggagcttgcagttattgaactaattcaatacctcatcttgaaagcacttttaattttatatactcaggcaaaatgacagtttgcttcaaactctaaccatctcttcctttgtattttcttgcctctttaatcagagctaaagacatttcataaaatgggcatgaaggattccttcaaatgaagacgtggacaaaatgattggtcaggtcctttgctctactgttgaatggaggaggattttttttttttttccctcacacaggggttttcttggagctcaagtttggatgaccccagacagtaagataatctcatcatggtaaagttaatatgaaatatgtggtctccaaacagcctctcccagaggccaggatcagcaggtttgagtggataattggcttgtggtcattttctcataggatttttcttttagtagtggaaactgtttttcaaatcaaatttggatgccaactatgtggaacagaagtgtggctgctctggtggaagtggcaatggtagtcctagagtctccctgtcagccacaccctttgtctccccctacccaagggaccctgtggcctggaaccgcagtgtgaaatgctatatagtgcaatgaagtcaattcgaagacaagagttctttgcctttctcatctaatttttagttatggatatgagacgcttgttcagaagtatggaaaagtatatataatatgttatcttttagatgtgggtgtaaatatgcttatgtatgcaatatgcttatattttaacgcataaacaacatgaataaagcaaacactctagacttctccaaatgtatcttgttttacagttttcattttggaaaatgtcaacatttttacattaaaaaatattactcagccataaaaaagaatgaaatcacgtctcttgcagcaacatggacagaactggaggccattattctaagtgaaataattcagaaacagaaagtcagatgccacatgttctcacctttaagtgggagctaaataatgtgtacacatgggtacagaatgtaaaataatggacttcgaaagggaggctgagatgggaggaccatttgaggccaggagtttgagacaagcctggccaacatggtgaaactgcttctctactaaaatgcaaacaaattagccagacatggtggctgacacctgtaatctcagcactttgggaggccaaagtgggtggatcacttgaggtcaggagttcaagaccagcctggccaacatagtgaaaccccatctcaactgaaaatacaaaaaaattaactgggcatagtggtgcgtgcctgtaatcccagctacttgggaggctgaggcacgagaatcatgagccgagattgcaccactgcactccagcctggacaacagagcaagactccgtctaaaaaaagaaaaaaaaagaggataggattagggtgagggatgagaaattatttaatgagtacgatgtacactactacactcaaagcccagacatcaccactgagcaatcaatccatttgacaaaactgcacacctgcacttgtaccccttaaatttatatacaaacaaaaacaaaggcaaatcaaaaataaaaataaaacaaaatgatctctaaacaatacaaacagtaactgatgaacctagctgcttatcatgtcagttccaaaatcacacagagttgaatttctttcaaatgaccctacaacacagtattttgatcatatattctccagtagagtataagctaaggacaaagaaaaacacatgaaatcttaaatggtactcggtagttttattgttaataatgatgctggtattattattttgaaactcatgtccatttctcagctgccatttgatattaattttttttttttttgaggtggaatttcactatcactcaggctggagtgcagtggtgtgttctcagctcactgcaacctccacctcctgggttcaagcgattcttctgctttagactcccaagtagctgggactacaggcacgtgccaccacacctggctaatttttgtatttttagaagagacagggtttcgccatgttggccaggctggtctcgagctcctgacttcaggtgatctgcctgcctcagccttccaaagtgctgggattacaggcgcgagccactgcgcccagccagtgatttttaacctttatcaatctgatagacaaaaagatcatttcattgttttaacttctttaattatgagtaaatctggcaatatattatgaaaacaatgacaagaagaacttgatataaaatgcacaattcagacgtccttgaagatcattttagaggcagcatgaagtggggggtggcactggtgatgggggctgggtgtggagaaaaccagccaaaggaggactcatgggatcctggagcttttgactggggttcacttggagcccatactcaggctggttctgacagcagcacctgccaggcctcagcttaggggcacaatgtgggacacatggactgggggtgtggtcccagagcctaagaggcaccaacagagaggtctccgcagagactcatctgtgccccccacccaccaccccgggacaggccaagccagcgtctggccaggaactgcttttgcacaaggagccagaagtagtttgccccgataaatgggggcctggactcacgcaaaccattgcaccatggatggccagagaaactcagagaaccttcctgtgcttgttaacatactctctcacgtcctctgcagcctctgccaagccaagcagccagctcctaggactcccctccctccacctgaggctccttgtcctcccttcctcaggagtctccagcctcccgggacttcccctccccgctgcccactccagcagaggctgccaactgcctgggagagagaagtgggcttcctggggccacctccccaactttggagtgtttggaaggtgatggagcgaccactaggaggcagtgtggacaggtctctgtaggactgctcaggcagacacctttgcagggacctcccaggtcgggagccctccacacttttcccatgggagcttctccctccaccccgagtcactactatctgctttcctagaaggcacttctttacttctaattcttctccactgcccaggtaactgatattctcaagtgggacattgtaatttgtttaattcatttaaattgatttcatataattgggagataaagattgttcagttgcaagacaaagtcttaacttgaactctcaggacacgggtgggtccctaaactcaatacgtgagtgttgctgccgggctgttgggccatcttccacccgccatagatcactttcttcatcaaagaagaaggaatatttagaaactggtagtacaaaaaaacaaacaaacaacaacaacaacaacaaaaaaccaaaacaacaaaaaacaccaaatcaccaaaaacaaacaaacaaaaaacaaataaaaacccaaagcagttgctcctataaatagatgtgtgtatacatgtggctggtatgaatcttatccacaaattcagttttgtgggaaacatcacatttatttatttaaatcaagtcatatgggacttgggcatggttggaggttcttaccccaccccacttcccaaggccagtgcacaggcagggccttgaggtcacccttagccgatgcttgggtctaggtgctcagacccaagcccctgtggtcccatcatgtgggcactggcatctttgctgaggctgagaatttcaaagccaggatccagcccatttaggtaaacccaaagtcactctcccaggtggcccagtcatcttcttgagaacaagagccatgagcctcagttccctgcctcaagagcctctgttcaaccctaggcttgtagacaactctgccccttcttctctcccttcagtgtcacggtcccctgtcccatccctctctgggacaggtaccacaacctccccaccatacacagggaaagggtcagccctcaggtttttggcctggcatcttgaatctcctcccaggcaacaaaccacagagggcctggcattctcctgtgaaaagcagggcggaaaggaaacacagagaacaaacccacagacaacaaacccagaggcaactaacccacagacaacaaacccacagagaacaaacccacagagaacaaacccacagacaacaaacccacagacaacaagcccacagacaacaagcccgcagaaaacaaacccacagaaaacaaacccacagacaacaaacccacagaaaacaaacccgcagagaacagacccagagacaacaaactcacagacaacaaacccacagagaacaaacccacagagaacaaacccacagacaacaaacccacagacaacaaacccacagagaacaaactcacagagaacaaacccacagactacaaacccacagagaacaaacccgcagacaacaaacccaaagagaacaaacccacagacaacaaacccacagacaacaaatccgcagaaaacaaacccgcagacaacaaacccacagagaacaaacccacagacaacaaacccacagacaacaaacccacagaaaacaaacccacagaaaacaaacccgcagagaacaaacccacagacaacaaacccacatcaacaaacccacaacaacaaatctacaacaacaaacccacagagagcaagcccacagggaaccagccaaattatgtctgctgtgcatctcggcagacgatgctgccaccgtctgtgtatgagcatgtgtgtgtcagactttcccatcgtctccaaacttgttttcagaataatgcttccagtgaaatgagtcggccacatgaggtcacaaagcccctactctgttcagcacctggggtaagtaataatattttggagcacttagtgtggggagtagccctgacccctttacatgtcatgtcttagttcattcttgttgccatccttggaattgaggccaacatcatctgcccatttgccagacaagctgctcaggaggagagggccacagccccttatctcctcgccaaacaagagaagatccccagttgctttttttttctgtggaagagattcttttaaaaacatttttttcatggagaagaaaatctgaaaaaaaagaatgaaaccgaaccaatagtcccatagacagttagttgttgttgttgttgttttgtttgtttgtttgtttttgatgaatacagaaattgacccttctggtcttaaagcttgaaaattaaatttgttttatctgagttgcttcctcaggaaaggagcccaagtcctctccaaaagtatcagagaactgaaactcaccagatcatcttgtctagacaatgagacgtcaggccctccattcatcatgactgcttccttacccctcccgagttcctgttacatttcttccctgctatataaacccctaattttagtgggtccagaagatggatttgagactgagctccatctcctgggcagcagcacccaattaaagccttcttccctggcaatactgattgtctcaatgattgccttccttccttcctttctttttgagatagagtctcactctgtcacccaagctggagcacagtcgctctatcttggctcactgcaacctctgcctcccaggttcaagcacttctcctgcctcagcctcctgagtagctgggattataggtacccgctactacagctggctaatttttgtatttttttttttttatagagatggggtttcactatgttggccaggctggtctcaaactcctgacctcaggtgatccacctgcctcggcctcccaaagttctgggatgagaggtgtgagccatcacgcccagctgagtatgtgtgtgtgtgtgtatgcttatggggatgtgcaaatgtgtgtgtgaatgtgtgcacgtgtccttgtgaattgtgaatacccaggacttgagcacactcagttcctgatgcacttcctgttttctcagcagctgagctcaggcctggaactgagtgacagcacacccgggcacctgtctccctgggcacccctccccccggacacccctcccccgggcacccatccccccgggcacccctcccacgcctgcttcccacggcattcccagctcccaccactgggaaggagctggaatcatgagtcgggataatcaccgaattctcttcgaccttcctcagctcctggtttgttaaggcaaacccccatctctggcttctcctggaacctcacctgggaaagaaagaggcagccccggagctggaagctgcttcagggctcacccggaacagcagactcaacctggacccatccaggcatctcctgggagtttcacccaattgcttctgcctggcaccagctcagaggttctgacagaattggcctggggtgagacctggcatccatgggatttttacaagcttccaggtgattctacagggaagccaaggtgagaacccctgtcctagaaccaggtctgatcaggggccggtggggaactgtgggtggagaacattagtgcttccagagcctcagggttggttttgaaaggaacgtaacacatttttttttctcacaaagacatatagagagagactttttaaaatagacatatatatagagagatgttttaataaagagaggtttgggtttatataagtaaaaaagatgatagaaaatagagaatgagattaggcttccccttgctctcaaaaaatggtttgagagtcttggaactggttccactctatgatagccatgagtactgttcgcccaacttttggttctcagccttccaggccccggtgggatgagacttccctgcccccacggttgagaggagccatgggcttattctagccaatgaatggtggatggacgtgactcgtgtctcttccaggctggagcatttaattgtccaggtgagatactcagggactcgtccctccagagctgagaatggccatgtttccagagggtctgcaggagcaacctgagtctcagagcacagccaccagcagacctgctgcacgcatgtggcgggggaaagaaagaaagccagctgtctgcagccactgagagtttggggtggttgtttctcatgacaaaaccagctcaccctgacttatacaaagtctttgagttatatagatggagaatgaggctcttgggtccctctattctcacaaagcaatagcctagctaaatccatctaactagggagcagaaaaggggatgtgctggcttgcacaccctagacagttgttcaagaagtcaggacaccaggcctggagtgatacttcagccatccttctaggtgagggtcttgaggccacacagacagaagtggcagagatgggacacacattcgtcttctcactcacagtctggcactgagctgtgggctgctgggacaccatgcccccatacgagtagccttcccactccttaccttgaaggaaaagtgttttttggacaaatacctgatggaaacattacatgggccttggaatctgttagatctagcttcctgaaactcttgctagctgtgtgacaatatacaagtttcttaacctctctgagcctcagtgctctaattacactcccctcatagagtttctaagagcatcctggggctggcacgtgtcaacgcacccagtatttgatagagtttgttaaacgttggttatcctctctccctatcgcacctcaaatggtaagggctgcctgccagcttccatatccccagcagtgccctgagttgttcagatgttcatccatctcccacagaactcaggttcctttggaggaagccacatcaagtcctgctccaagcttaagccagtcagcacattccatgctctgccccattgccagggttcaggagtatgctcgtgatctaagcacccccactcccagatacagctcaagattcttgcttggacttctgggcactcaggctcctccgagagggaatcaaacttacttctctccatgtcctttcctctaggagatgcgtctttcataaaactctcatcaacactgttcagacatgtcccaccccagcaggggacagcctgggctcaagctgggatccctactttatttattttctgctaattaaacttcctaatatactccacactaagtgtgcttgcaaggcagggggtgtgggataagcggccctgcctggctgggagagggggcagctccctgctgtactatgtattaataaagagacacatgcatggcagggcttgtctgggccttggtggcagcttaggacagaaggcacgtgacagtcaggggttcaaacaacccagggagaacactgcttcagggaagacagctcagcatcttcctggcaaagataatgacattgataatactctccaaagaatttcaggattttgagcaatcagaaaagcaacacagaaattcatgtcatcaaaacgatatggctctattggacacttaagacatttattggaggctcaacaacataatcctgctggttggttttacttcattgattttccgttgtgtctgattacattgctaatgctgatggtggatgagctacggctcttttcctgcctgtcctgaggtttatccaccaatgtttcagttctgttttaagatattgtcctaagcccccagcatcgcatgcatgctgtttttttgttttgttttgttttgttttttacaaagagttcatagcccgtggaagactctcctccatcacacacttaggttccctccacaccaggcctggaaggagtctagcttctggggactgtacatatgctgtggaccatgcagaacctggagaggcggtgaccccttctagaagtgatctgcctgaatccttccctctggaggaggcatttattaaatgccaggttcctgaaaggctctgagatgggcactccctctcctgagtcgtcccttccattactgctttcctatttctggccagggttccctggcccctcctccctgctcccatgggaccccagttcatccccatctttgctcaattgccctgcactgtagtaatccattggcactcttgtcttctccaggagaaatagttggaggagaagtttatagggtttcctgggccagggctggtctacagtcactggacagcaggaaacgacccttcggggcctaggagggccaaggctggtgggcaggtacagggggagccagcactgctgtccaccactgtgcagcctggaggctgtttcccatgaccctgctgatgggacccaaggcaccccaggccacccactcccctgcccccagcagggtgtcagctccccggcttccctgcatgcctgcctgacatggacagtgcaccttcgggccacacttgccctgctagcgagcctccagtgaactgggaattccacagagtgtagaggactcgccccagcactgtgctgagaggcttcaccaaactgtagcctggcttccacctgcactaagctgcatccccagaggcgaccccagccctggctgagtcttggctcaagactttgcaatgcagccaaatcacaaaatgcacctcgtccagcccaccccgctaaaccattttcagtagttctcccctcaccgttctggaactttccatttccacgtggcccccacgttctgttttcatttctccttcagtccctttttgttccctttctgttctctctttgaagacctcagtcaccgttttctgagttggggttgagcttggtcggtactggaatctctttccgctgctgcaggagtctgaaggaatcagtcttgccgcctgtaacacatgtccagcgctgctttttctctgatgagtgtcttagtcagtttgggctgttaaaacaaatggcttaggcaacacacgtttctgtctcacagttctggaagctggaagtctgagatcaaggtgttggcagattcggtacccggtgaggacctgcttcctggttcgcgggtagaacacttcttgctgtgtcctcacaaggtgcagagagagaggggggtctggtgtctcttcctgtaagggcactgatcccatcatgggggccttacaatcgcgacctcatctaaacctcccgaaacctcatctaaatctcacctccatactatcacattggggattaaggctttaacatgtggatttcaggggacaaaggacaaaagcattcagtccatggcacatgctcagtgcctcgactcttgcaagtgccacaccacagcctctctggggctgtgtcctggaggcgtgtgccatgggccctgtgtgccatgggcaaggcgcacagcatcctcccggccaccccaccagcgagtgagctcctggcaccctggctctctctggtcacccatctaccagtcttggtgctcctgtgcactagaggaccagctgcctggggactgtgggccaactgtggccccggccacccacgaacttcccctccggccagtggctgcaatcacatcttctctaaagacgtctgaagcccagccttggggagccgagttggtccttccctgggtactgagccctagggaacccttgagagttctctttgtatctttgtagtttcttcctcaccacttaatcatttccttacaggaaacttcctgtgttcaagtgactgtatggtttctgcctccagcttcatttgtgggtgccataagagaggcaagcatggagcactaggcgcaggggatgggcaactggcaagcggggagatgcatgcagcgcacttagtgcctggtacataccaagtccttttagtctggatttcattatttttaaatgggtattgctatttttaaaagaatagttacaaatatttattgtgtgttttgaaataagtgggtcaagatcaataagatattgttgatcaattgatcaataagatatcttttattcttaaaaatcatattcttctggttcagtggggaagagactgccgacctgtatttacagcattatgtgataagtgttctccttttcaggtatgtattagtctgttctcatgctgtcaataaagacatacctgagactgggtaatttataaaggaaagatgcttaattgactcacaattcctcatggctgaggaggcctcaggaaacttacaatcatggcagaaaaggaagcaagcatatccttcttcgcatgatggcaggaaggagaaatacagagcaaagtggggaaagccccttataaaaccatcagatcttgtgagaacgcaatcactatcaagagaacagcatggaggtaattacccaccggctccctcccatgacgcatggggattatgggaactatagttcaagatgagatttgagtggggacacaggcaaaccatatcaaggtgactcctgcaagcacctacctccacccctccttcatccttgccctcattctacaatgatttggtgaaatctggtccctgcctcagttttacagcctccccatgactctggttacttcctgattagcttaaacgaaacctaactaggttgccctaggaaagcatttctgttcctgacaccccccatctgcctgctgcttccgttccacctgtatgtgtctgggcacatccctgcatccctttgctggcttctagcctactcacttcaagcatttatcccatgagtttcataaaatcgtagaagaaaagggcttgaggcagtggtggggaaatgataggaaagtcatttctggatgcattctgccatcctgcagatccctaaaccacctctccctctccattccctccctccagagaacagcttctccttgtctcctgtggaatagttccgcccacattcatgggcccttcctgtaccaaaactgtacaggtctctcttgcttaccaaacacttggcaaacaaatgtgccgtccttggaaaaattctgttgaataaaattttctctctttgatccatccaaatgttttacaaagtgctacagaagccatggaggaacaagcaattctgccttagggatcaaggtttcacacagggggtgatatctgagcaacagtgcttttttggtttgtttgttttgttttgagatggagtctcgatctgttgcccaggctggagtgtggtggcacaatctcggctcactgcaacctccgcctcccaggtttaagtgattctcctgcttcagcctcctgagtagttgggattacaggtgcccgccaccatacccagctaatttttgtatttttagtagagacggggtttcaccatgttggccaggctggtctcgaactcctgacctcaagtgatctgcccacctcggcctcccaaagtgctaggattataggcatgagccacagtgcccagccaacagtgcttttaattggcattttcttcaaagactttgatgtcctataggagggggcctatgactcagcctcagccaatcagagcgctccattccctgggtcacctgcacacctgctcttccctgatccactgcagtgccctcaccctgagatctgaaacttgagcagaggcactaaaaggcagacatgggagctgagctgtcttttgggagaatcctagtgagaaggttctccaactggggccgccaagtaagggcctcatggcagactaacccctctccttcctaaggctgggaggagctgctgtccttttgattctgtgagctacctcagttaccttcctcaaaatcacacacacgcgcacacacacacacacacacacacacacacacacacacatttgcatgcgctaggtagagctgttttccataattgccaacagaagactaactgtatttgaagaatgagctggcattcttctgctccggtagaagtcaaggcaatcagttatgagaatcagagcccacctgtgactccagaaagaggtgcataaataccaagaatttagtctctaaagtctttctttaagtccttttttaaaaaatgtgatgagtacatcacccaggaaaatcaaattgtaatgcaaccgagtcgatgcaagttttatttaggagatgggttacaatcacctggggaggctctagttaccttgatttggtctggtacaaaccctagcaccatcatccacagatccccagaggaagtcattcctggatgacttcctcatcgattttaaataatttccatttcagaggaaggcctttatctgacctgatcccctaaatattgggggaaacctacatagggacaaagacagcaggtgtctgcaatgttgagaatcagtgtgttctgtcactgtctctatcagggctggtggcacatgcaaatctctttcccactctccagttgaacactaacgccatggtgcccacaccttccttattagtccatgtacatggggtttgtcaagacagtggttcatggctctgaccctgagcatgtcagatttcaggggctttatgcaaaatatccataccagttggggtcatttcccatcagtattgctcacaatggagcctacaaacccctagttcccatccaacacatctccaaggcagactctcagaccagctcccagaaatgaggtgagtttagatcaggcagcagagaggtggcctaggaaggagtccttggagctcatgcacctgtgtctgggcaccaacaggaagatggtggcttttgctctttgggagatatctttggagccagtctctgaccacatgtccaacaggacaggcatccttggggtttccatggcagtctactgacagtcaggggtgaggattaaatggtacagagtctcactgagtgctctttgagaggtcaagcaatgagaagtcctgcaaatgattattgagctgaagtaagaagtgtaccgaatctgtttttcccctataaatataaaagcctataaatataaaaatcttggtgaaaaaaaatgatcccagcctcccacacagcacatcacacatcttctcttttcaaatttgactccaaggcccacttccttcgggaaatcatttatccagtggtatcatttaggatatttttggttgtgaggaacaaaagcctagctccaaaagacttaataaaaggatctcattggttcacaaactgaaaaactccagtggtaaatgaaggctctgggtacagttggtacaggctctggtctctgtaatttcctagttcttctcccttctagatgctgggtttttgccttcaagttggctttcttcatggtggcaaaatggatccagcaattctgtcagaggttttcgaagcagagtgactccatcttgattaaaggctgtgtaaaatgaggatgagacttgctggactgcattccaggagggtaggcattcttagtcacagggtgagacaggaggccagcaggattgatatcacaagacacaggtcacaaagaccctgctgataaaacaagatgcaataaagaagccagccaaaacccaccaaaaccaagatggtgattaatgtgacctctggtcttcctcactgctcattatatggtaattgtaatgcattagtgtggtaaaagacacttctactaactccatgacagcttacaaatgccatggcaatgtccagaagttaccctatatggtctaaaaggagaacctatatagtctaaaagaactgagggttctgagaaatccctgaccctttcctggaaaatttatgaataatccactccttgtttagcatacaatcaagaaataaccatagtgtactcagtcaagcagtccctgctgctgctctgcctatggagtagccattcttttgttctttactttcttaataaacttgctttcattttactttatggacttgccctcaattctttcttgtgcaagattcaagaaccctcccttggggtctggatcaggatcccattcccgtaacaatttcaggctcagatcggcttttaacaccatccagagcaagagaaagcttttttgttccagaattccccattaaagttctcctggtcactcttattgggttgtttcgcttagggtcaggtgtccatcctggtcccaagcaatgaggccaggagatgggatgcaacgactggatcaatctaggcctcttattcccactttttaaaacacttattattattattttttaaaaattatttttcattcagctttttcatttgaaacttattccaattcttgaactgggggtagtttcaactttcctagagctgtatgggtcctcaaatgaaaattcggggcagctggattagagaagggggaaatgcatgctgcaggggcaaccaacaaggggagattgtgccaattcactcttcctatcctcagattcacctaagttctgaccattcagccccatttgaatgcattctgtattcctatgactgtggattacatttttgtctacctttgtgtcttctgttttgtcctgccctataagcatctcaaacatatgcataaagcctatataaactttataaataaactaacacttctgttttcaacctgtaggatgatgacaatgatgatgacgacaatgatgatggtaatgatgtggaaaatgtgaaaagagaaagaaatacttggaaatatatctcaccctccataaacaaagctcggggtttaattctgacctgtatgagttcatggggtgaactgcagaccgctgtctgtggacaggaaaacgatatttcatctctagccccagggacatctccaaaagctgagctagatgaactttatataaattggtacaaaatataattttctctttgcctgctgaaagccatttctagaaattctgttaatcagaatctccctaagttaatcagtcatctagacagatcttatttcttttttagacaaagaaaagtatataagtaacaggtattggtaaaccacttgagtgaagcatatgatatctaatgtaaggaaatctaaaagtgtccacaggcaaaatctcatggattcaattgatagcacaggtcatcaactgacatgcagacggaattctcttgtggaacaagacaatacagccattgcttagagactaattgtcaaggaattagtcatttcctgtttcagaatagcatcatcaccaccaccattaatgccaacatcaaccaccaccacctacgccaccaccgttagcatcataaccaccaccaataacatcaccaacagcaacactgccatcaacataaaccatcaccaccaccaaaaccattagcatcacctagaaccaccagtcaccaccatcaccacttaccacaacaaggcttatatttacatacttattttacttttcgaaatacattcacatgcatggtttcattagatcttatctacttggtaaggttggcagatctgacatcattagcctcattttatctgtatggaaactaagttctagagaagcgaagtgatgtgtgaaaggacaccagagtgattgataatcaaatccagactagagtttggttcttctgactccaaaattaatacatttttcttaaaagaaaaaaattttttttgagacagggtctcactctgtcacccaagcttgagtgcagtggcatgatcacagcttactgcagcctcgacttcccaagctcaagcaatcctcccacctcagcctctcaagtacctgggaccataggcacatgcctggctaatgtgttttaaacattttttggctgggcacggtggctcatgcttgtaatcccagcactttggtaggccaaggcaggcggaccacaaggtcaggatatcgagaccagactggccaaaatggtgaaacctcatctctactaaaaatacaaaaaaattagccaggcgtggtggcacatgcctgtagtcccagctactcaggaggctgaggtaggagaattgcttgaacccaggaggcagaggttgcagtgagctgagattgtgacattgcactccagcctgggcgacaagagcaaactccgtctcaaaacaaaacaaaacaaaacaaaacaaaacaaaacaaaacaaaacaaaacttttttttttttttttttgtagaaacggggtctccctaggttgcccaggctggactcaatcttctgggctcaagtgatcctactgcctcagggtctctaaatgctgggattcaggcatgagccaccacacccagctccaatgctttttttgtcgtacctaattctttcaatgaaaatgaagaatttccaacttctgatattaacaactttggtcctatattcaagctagagtctttcaaataaaatagacttttaaaaccatctgtctccaaaccctaaatgtctcaggtgagcaactaagctgctcagtttatgtgactccccagaagttgaattttaacccagaactgactccaagttcattcttctttccacgacaaggagtcacctccttgtatgcccccaggagtctcccggattcctccgagaacagtggaatagtgctcctccccagagcacaggttttgccagtgaagattgaatttggctagaaaccgctgccctgctctctcttctcgaagcacctggaagtctgagaaggaactgggtggctggctctggtcacaaactagcagccagaagcaccccttgtcagtgatgcacccccagtccccctcaagggctccaagtaaacccaaagctgctcccctccaagaagtctggggccaccctagggaaggcctcctggccttgactctcagggggtctctggggttgcggtttggggcccgctgcttccgccctttgcccccaggtgggcctggcagggctgcagcacagctctgttgctgatagacagggtggagcacttggcgaccttgccctgcagccctgtcattttgagttcagaggtcagatttgagtaataaacatcttctaaggacttgtcattctttctgaggatgttgctggccagccggaagacgaaaatcaccgcgtagatgccgatgatggtgagtatataccaggcagcgctggttccgtctggcaccttcagagccctggtggagttggtgtcattcctcccctctgtgtggtcacccagcaggagccccaggagggtgctggcctgggtctggttggaggcttcatggggagtccacttggcccctgagaaacagagaggtccggatgagatccagcgtcctgggctgagggctgcctggccacaccaaggagaatggagccctcatatccgtgaaaacgtgtcgctgctcaaagaggccttctctgaggcatgagcaggagtgtaacaacaggtatgtcaatatatttttaaaaatcaaaagagtccaaaacactattttgttgttgttttgttttgttttttgttttgtttgttttagagagacagagtctctgtcacccaggctggagtgcagtggcatgatcataacttactacagcctcaacctcctgggctcaattgatcctcctgcctcagcctcacaaatagacatgcagcaccatgccgggctaatttttttcttttttctctctctttttttttttgtagagatagggtcttgccatgttgaccaggctggttttgaattcctggtctcaagagctcctctcaccttagcctcccaagccctgggattacaggcaggagccactgtgcccagaaaaacactaagttcttgaataggagacacaacatcataaagatgtcagttatccctcaaataatttatacaacaaacataattgcaataaaaacagcaataggatttctttgtgaaatcaataaactattcatttagaaaaatcaactgttggccgggcatggtgtctcatgcctgtaatcccagcactttgggaggctaaggtgggaagattgcttgagcccaggaggttgagaccagcctggccaacatgacaagaccctgtctctacaagaaataaaaaaactagccaggtgtggtgtgcaagcctatggtcctaactactcaggaggctgaggccggaggatcacttgagcccaggaggttgaggctgcagtgagctgtgttcacaccactgcattccagcatgggaccctatttaaaaaaaacaaaaaaagaaagaaagaaaaagaaaaagaaaaatcaactgtcaagactaattagaaaaaaaaatctgaataaaaagaatgactaatgaattagcctagccacaaattttaaatcagccagctataaaaactaatttacatttttttcaatgaatgaaagctttatatgcacaaagcccagctgggacttgctgggctttgcagagtgtgtgggctgggggttcttcagaaccaggtacaactctccctataaaactacaacagtgctgggcatggtggctcacacctgtaatcccagcactttgggaggctgaggcaggtggatcacctgaggtcaggagttcgagaccagccctgccaaaatggagaaaccccgtctttactaaaaatacaaaaattaaccaggcgtggtggcacacacctgtagttccagctactagggaggctgaggcaggagaatcgcttgagtccaggaggtggaggttgcagtgagccaagtgatgcctgtagttccagcaagacagagcaagactctatcttaaaaagtaaaaaaataaaaaataaaactacaacagctaaaatagtgtgatgcctgtagttccagctactagggaggccgaggcaggagaatcgcttgagtccaggaggtggaggttgcagtgagccaagatcgggccactgcactccagcctgggtgacagagcaagactctgtcttaaaaaataaaaaaaataaaaaataaaactacaacagctaaaatagtgtggtgctgaaaacacaggcaagcagaccaatgaaacagagtaaaaacagcatcaatagttagcaattagaatttgatagctagctaataaaggagcatttctgatcggtgggaaaagatgaattattcaatatgtagcattgggggaaatagcattagatccacatctctccaccatatgaccagataaatcggtccagattaaaaaaaaaacagcccagataaatcaaatattttaacataaaaagtgaaataatttatagtactagagtacagcatggcagattttttctttatcatctcagagtggaatattcttttaagcataacaaaaattcagaagaaacaagaaatagaaatcaaattcaactacataaaaaaaattaagctatttcataccataaaaccaacaggcagatgacaaagtgcaatttatatcactgattttctaaatagccttcggttctgtaagaaaaagtttaaaactgcagtagaaaaatgtgcaaaagatatggacaaatagttcacagggaaaaaatgaacattcaacataagaagagcttctcaatatcactcatataagaaaaatgcaaattaagataataactagataccattttgttacctattggacttgcaaattcatgatgtttcagaataaactaacaaaaaaatggcttttttttgttcttttgtccagcttagaagaaaggtgtctaaattgggagcaaaggtggcaatgacgtggacttgacaccaaaaaaaaatttttttaaagaaaagaaacaagtgcctctgcatttcaggggtttaggattggcatttttaaaatgtcaacaaataaatgttcatatccacacttgacattttttccaaggagaattttaattgtataattgctggtaaattcatgcagccaacatggagggcacacggacaagatctatgagcattacaagtgcacttacctttgacccagcaattctatctctaggaatctatcctaaagatgctccagaacatctagagacaacatatgctgaaggttagtcattgcagtcctccttgtgatgacgaatgcctgggaacagcctgaatagcaccaactgagggatggtgaaatacattttggaacctccatgcagtggagtactacacagtcataaaaagcaatgagttttttatggtactgaatgttaataagtgaaaaaataagctaatggtgacatgctctgcaatgccacttgtaaagaagggggaagttatatgttatttgcttgtactttttttatgtatagaacatctctggaagaatgaataagaaattagtatctgcaattgcctctggggaagaaacctgggggaagaagatatattttttactgtttgcccttttgtacacttagtaccgtgtatacttatttttgaaaagcaagagtgtaccagttggtacttttctggtctccctggtgaggtgcccctgggtaaagccgttgtatgcccttgtaagaccagaagattaagatctcaattgctgttcaattcaaaactgttttctctgcttggagagctggtggagaaaatgaaacaatgaaaaccagagctgtagagtgcaatcctgtgagacatttcccagtggggccttactggctcaaacccccatttcttgctctaatgtgaacacagatgtatttaaaaacacatcataggatcaatcttgcagcctgctgtgcagaacaaaggtgctccaaaatgcttcccatttgatcgttgtttgttgctaattcattttgcgaacgcaagactcagagaggccagtattttttattatagttagttgccagaatgtgtgaatgagcttattacttttagatgaaggaagaaactatttaaaaattacttttcaaactacatgtgacaaagcccaggacaaatgaacagatttaattacataaaattagtcactcgcaagaaacaacaccacaagcataaatttacaccattgtttggtagaatggtttgagacattaaagtaaggaaggtgaaaaattcccgtaattattgcaacaaacaaacagacagcaaatcaacccaacaagaacacaatatccttatattagggcaagagaacttattgaaactcagaacacatgtataaactcatagaactttctagaaattgtcatagaatgatgcaacacattcaaatacaaataaaatatccccaactaagagctacacacagaacattaaattatttaaaaaccagtccattttctacacgaaagaaactcactatattaattactgcaatacattacattttacctttcttacaaaggtaaaagtaagttaggttgtatcttaatggacaaacatatcctgtagaagagagaaactttttcctctgtgctattttgtacttgtaatttaatgacgtgaaatatgtaaaatctcaacctgcccatccttgcattgtagctgagtactcacattccatggggtggtcttgtccttgactcttggaggggcaagttcaagcggctaccatgcacagaaggggaagatgatgaaaggagaactccgtctcctagggaagaatcagtcctactgcagttgagctgcactgagtttccagagtggggagtaatatgatcttccaacaatcttagggcagcaccaaacagaaacttagtaagtggatgactttgctttcatgcaattaatcagaggatccgatttgctgtgtcttctgttgcatcagaacagaaagcacttcccagctttgacttgttaagaagttctcaatcaaaacaaatttttaaaacgtgctggtattaaggaatctccatctctcaggtcccatcatgaactgaggtggccagaagctccccctgaggctggctctccgcttagagcttggatggctattgaattcccctgtgttctgcacctgttgcaggtgtggcagatggccaggtgtggcagagatctgtcatcatagggccaggaaactccatggtcaagagtcaccagcttcctctggacagtctcccagatgaggaaacccagacaggaagggagtgacaccccaagggtgacacacctgaggggacttgggctttccctgaggggtcagtgggcagtggactcctgtgccaggtggtgagaaatggctcttctctttcccagagtcacagaccccattggagttgaggtaggcttaattggaaagtgttagagtaagtgtctgcgggtaaagtttccccaggagcagggagggaaaagttggaagactggcaagttaaatcatccagccattgtttccagttccatttcttcctaatcctcactctaggactctaacttgccacgtttgtgatggttgctggtttttaagatacaatttgatgaaatttccatcaatggggtactgggtaagtaagttataaaataagccatatgatccagcaattctactcctgggtatcttcccaggagaaataaaaatgtaagtttacacaaaaacttgaacacacatgttcaaagcagcattatctgtaatagcaaaaaatggaaacaacccaaatatccaacaactgactaatgaataaataaaatgtggtttatccatacaatggaatgttattcagcaataaacaggaatgaagtactgatatatgccataacacggatgaaacttgcaaacattgtgctaaataaaagaagtcagtcacaaaggactacatattgtaggatttcatttatatgaaatgccaagaataggcaaatctacaaagatagaaaatagattagtggttcactagcgggagggattgggggtgataactaagggtatatagcatttttggaggggtaataaaacttctaaaattgtggtgctcactgtacacaatctgtgaatatacaaaaaaattgaatgcatactttaaatggatgaattttatggtatatgaattatatttcaataaaactgttaaaaattataatatacaagctgggtgcagtggctcacacctgtaatcccagcactttgggaggccgaggtgggtggatcccctgaggttgggagttcgagaccagcctgaccaacatggagaaaccctgtctctactaaaagtacaaaaaattagccgggcatagtggagcatgcctgtaatcccagttacttgggaggctgaggcaggagaattgcttgaacccaggaggcggaggttgcagtgagcagaggttgtgccattgcactccagcctgggcaataagagtgaaactccatctcaaaaaaaaaattataatatacatatacaatggagtattacacagctgtgaaaaagaacgaggaagctatttatgtactgatgtataaagctctctaaggtgtgctgttatgaaaaaggtaaagaagagagcatgttaacatgtatccaaaaattgagaggaagcatatatatatatatctgattttgccactgtaagcatttaaaacaccagtggaatatccaagaaattaagaagaggggttacctattggaggagagaaccaggtagatatatggcaggtgtgggagggagagctctcactaaatatttttatgctttaaatatttttaaccgtatgtgtattacctattcaataataaatgcacccatttgttagatatctttgttgaagattcatttggctcctgctgtctcttgctatgggatggaccatggcatcccccctctgccacacagacaagggatttggacactgccagtgggacgtgggaggggagagcacctgacccgtgataataaggggctcgtggcagtgataagggctgggagtcagggctctggccccagccacatccttgctgcatgaccctgggccagccccctcatctttgtgagcctcagtttcctcatctgtgaggtgaaggtggtgaaggaggtgaaggatgagcaggatcttatgtccttggtcctgagaaggcaggagagaagcctggggctctgtgtgggaagagccgctctctggggaggtatctgaatagatgagggagagcacaccgggcagccaatgtgccagaggtggaggctttggagagtgtttcatttgtgaagtcaacagatttaacattcagatcaggaggacgttggcatgagatgtggggaatcataagctccaaaacaatcgtgagacagaaggaaagatggccttttgttgagcagccattctcctccacggagagtcctgtctagtctgcctgttgaaggggcactgatgttagggaatagatctgtgtcaaatgcttcccacctcccagaatcctgtgaggcaggagtattatccccatttaaagagaggacactcaggctcagggaagtgactggcccaatgtcccatagctcataggtgccagaggtgggtcatccacaccaaagtcattctccttccataccctgaatgtcaccttcacgctggacccaggatcctgtgtggtgaactgtctcgatcacttccctaaaggttaaatcataaactcttactgccaaggcatatccacgaccttaaactctccctgttgggcaaaaacaatctctgatgttaaaaggcaggatagtggatacttttcagggaagggtaaatgacaagggcatgaggggaactctgggtgccggtcatattctgttttacaggtttgttcaatttgagacacttcatagagctgtagccttgtgcacaggcacttttttgcatgcatcgtctgcttcaatataaacctcttcctgttgtcttgtttttgtttttgtttttgttttctcttgttttcttgtcctgctctgtcacccaggctggagctcagtggtgtgatctcagctcactgcagcccctgcctcccaggttcaagcgattcttctgctcggcctcctgagtagctgggattacagaggtgtgctaccacacctggcttccctgttgtttctttaatgtagaaagccctgatagatggtgggaaaacaaagtttaaggtattcatagaaaaatacaaatactatttttaaggattctatatctggccacatggtgccatctcacgaagagtgtccccgtcccttgagggggagtggtcgggatcatggtcagtgtggggccctgcagctgcctgcttccctatgctgtgtggatgacgcccgcctccggtcattcccctgtgcttacataacagtgaaatggaacaacctgtatcagcacgagggccaagaattttcttctgacttgtggatacctccttccttaggcctctgatcagtctggacaaatattgccctgaacgcaaccaagcaaagccactcacctggtaaatatttgtatgagctacagttctggaagaacaaattccaatatcctgcagtccccttgacatcaaagacccaactctcccagagggcaatggcttttttgtccactgagaagccagtcagcttcgaagaaaggtgtctaaattgggagcaaaggtggcaatgatgtggacttgactccaaaagaaattttaaaaagaaaagaagtgcctttgcatttcagggggtcagtattggcatttttaaaatgtcaacaaataaatgttcatatccacacttgacattctttccaaggagaattttctagaggagacagacctcatcggtcagctctgatgccctgcagtgcaaaaagacattaaaaatgacggtaaaggacccctgcagagaacaactgagtctcttccttgccctgcgtctccagataaaggatgccctgcatccatcccctcctggctaagagcacagactccagaggctttttcctctcctggaggttaaagaggcatcacatatgtttaaaatctttaatttatatgtcacctttgtccttccttttaacttcatttttctcttatccagcatttagggactcatctttagggaggttcaaaggaaagctcatggcctttagaactggaagaaccatgttccagttgggacttgatcatttactaattgtgggattacagccaagtcacttcatccctctgctgtaaaaaaaaaaaaaaaaacaaaaaaaaacatatgatgacatttgtggaatggctccccaagccaaagagggcaaatattgtcacagctcatttcttctctcagttaattacttgcgtcctcggctgcctggctggcaggacaacctatattcgcctccctcttaaagcctcctgggttggccaggactccaagcggctttgtccagaatgagtagggtggttggcctggcctcctcagccaatcagagaggactagcatctgaacactcctctgtgctattgcttctagctgccacatggggacgctgttgaacaccggcctggtgcagttggccatatgatgcttcagggtcttctgagacttcaagaatgtgctcacagggaaggtattagctctaaacacttgcctctgctagtttacatcacagaacagacagacaagactgttttgctccctcagctctctccttttcctagcttcagtcctggggagctcagaagctacagtttgttttttgttttttgtttttgtttttttcttgagggagtcttgctctgttgcccaatctggagttcagtggtgtgatcttggttcactgcaacctccgtctcccaggttcaagcaattctcctgcctcagcctcccgagtagctgggactacaggtgcctgccaccatgccaatctaatttctgcatttttagtagagtcaggatttcaccatgttggccaggctggtcttgaattcctgacctctggtgatcacccacctcagcctcccaaagttctgagattataggcgtaagccaccgcacccggccagaagccacagtttacaaatctgggggatttggggcatgggaacagaaacagaagagtcccaatgaaaggaagataccagctgagctgcccactctcccagctgcagttctcctgcccacagcaggccctagctgggacagggaggagccccagccttaaatcaaattcagaattttgtttatgacataagactgcacatcttaattactgaattaagactatattttccaacctatcatgactataggtgcagggcaagatcaaactccagtgtatgtggggcccgcagaagagatttaaagaaacagtgggggcagaaataaagctgtgtggttatcagatcccatgagtcttgtctgtaaggatgatggttacagtcgggatgctccagagtgcaaagccacatctcaaccagagttagtaacaagggagagtttactggttcatgtgaggaagagagaggaaggggagggctagccaaggggctggatgcaggaaggagggtccccagggttctctgtccccctcctgtcttccatctctgcctctctcagcaggttggcctaatttcctccgactgcagagaagcacacaagctgtggcacctggtgctcagactcacactgcaacacttccaccagtagatggcagagaggtactttcctgcctgttcagccacgaaaatcccaggggatggctctgactagcctaagtcaggaacctgctgtgggcaatcactgtagcattaagatgggggccagtgatggagccggtctgcagcacatgctcagcaaaagacaaaacccgcctgttttagatcactccggctgcatcacagagtgtggattgaacaggcacagaactggaggcagagaaacaagttaggcagctgcaggcataatccaggcaggagatgacagtatttgaaagaaggagtgggagcaagtctggagagaagtcgatggatccaagagatttttagaaggtagaatgtgcagaacttaattagttggtgcagtgggttgaatggtgtctccctaaaagatatgttcacctggaacctcagcatgtgaccttatttggaataagggctcttgcagaagtaagtaaggtgagaatcttgaggtgagatcgtcctggattacagtggaccttgtatccaatggcaaatgtccttataagagacagaaaaggaaaagaaagagacacagggaagaagatgtgaagatggaggcagggattggagtgatgcagcctcaagccgcagaatgcctggagccaccagaggttgggagaggcaagaaaaggtcctcccctagagccttcacagggagtagcgtcctgccaacgctttgattttgagctggtctccagaactaagagagaatagatatctgtttttctaatccaccaagtttgtggttattttgatgcagggcaggcaagcccccaaattgggttgtagcctgagagggttcttgggttcattcaggaaggaattcaagggcaagctggtggtattagacagcaacttctgttgaagcagcagtggacagcagcagcagaggtcctgctctttgcagagcagggctaccccataggcagtgtgcccagagtagcagctcgaaggcagttctgtagtcctatttacacccacttttaattatatgcaaattaaggggcagattatgcagaaaattttagaaaaagagtgctaatttccaggttgtcgggttgttgccatggaaaggggccgcaacttccggtgaactccatagtatgtggcacacactggtgggcgtgtcccatggaaaggtgcttccgccctgtacctgttttagctagtccttaatatggtccagtatccgcgccctgcctttggagtcaagttcaacttcctacctcaattgatgatagcagtttctgaaaactaacacatgtagatataaatataagtccttaagtctatcattattatgcatatcctataggggagtcatcgcgaatgaaactgaacttattgtggttcattcattcagatatttatttaaaaatatttattaaagcttactgtctgccagtccgatactgcactaggtaagtgctggggttacaaacagaacaagatagacagattagttgcccgcatggaacttatatctagtgggaagagaagcaaaaaaaaagtaagcaagcaataaacagtaaaaaaaaaaatactgggatttgagccataaaaaaagaaataagatgcagaaatcagcaataaggaggttggggagaagatccttctttagaaagaattgccagagaaggtggttgggataggcagaaaaaatagtaatattcctcttttatcttcacctatattagatgatcaatagatatttcctgagaaatgaaggactgagtatattataagaaggtatgattaaaaacaatcaccagaatgaatggctaacaagcacatgaaaagatgctcagaatcattagtaatgaaagaaacacaaattaaaccacaatgagataccacttcacacataaaaaggaattaacacttgctggtgaggatgtggggaaatgtcatatttccccacagcagccatagtacactgctggtgggaatataatatgatgcatctgctatggaagagaatatagtggctcttcaaaacgttaatcctagaaagcctgggcatggtggctcccgcctataattccagcacttcgagaggccaaggtgagaggactgtttgagcccaggagtttgagagcagccttggtaacatagcaagaccctgtctctataaaaatcaaataaaaaataaatagaggaaaagcacattaatcatagaactgccatatccaccacttccactccttggtatataccccaaagaactgaaaacagctattcaaagaaatacttgcacatgagtgttcagattattaacggaaaccaaaaggtggaaataacccacatgtctaccaatggatgaatcaataaacaacacatggtctatccatacagtagaatattgttgagccataaaaaggagtgaagtgctggtacattgccagaacatcaaagacccttgaaaacattatgctaagtgaaataagccagatgcgaaaggacatgaattatatgatttcattgatataaaatgtccagaaaaggtaaaaaatatccattgagaccaaaagcagattgtggttgccccggactaaagaaagagtaattacttaattttcctgggggtttcctcttggcatgatgttctgtatacaggacatacaaaaagcctttattttttattcttagcaaatacttaattagtactcaccatgagctgggcatgttctaagtcactttccaattactaacaaatcacttaattatattgacacaaaaagaatgggcataatgcataaagcaaatacgaacataaaaaagaaatctccctattaatatcatttatgttgaattcaatgcagggagcatttaaataagataaagggagatacttcataatccacactggtcagctaacatcatgactatctatgcagaagataaaccagcatcaaaactcataaagaaaaatttatagagagtaagaaaaaaatgaagaaacagtttagaggtaggtaatttgaatttactgttcggtgcataaaagaacaaataggccagacgtggtggctcaggcctgtggtcccagcacttcgggaggccgaggcaggcagatctcgaggtcaggagttcgcgatcagcctgaccaacatggtgaaacctgtctctactaaaaatacaaaaaattagctgagtgtggtggcgtgcactgtaatcccagctactcaggaggctgaggcaggagaatcgcttgaacctgggaggcaggctgggcgcagtgactcacgtccgtaatcccagcactttgggaggccgaggcgggtggatcatgaggtcaggagatcgagaccatcctggctaacacggtgaaacctcgtttctactaaaaaaatacaaaaaaattaaccaggcatggtggtgggcacctgtagtcccagctactcgggaggctgaggcaggagaatggcgtgaacccgggaggaagagcttgcagtgagccgagattgcgccactgaactccagcctgggtgacagagcaagactctgtctcaaaaaaaaaaaaaaaaaaaaagaaagaaaatacaggccacacagatggggagatgataattgcaagttatatatttgataaaggactttcattcagaatatatgaaatagtcttacaatttaataaaagaggacaaacaacccagtaaaatgtaggaaaaatatttgaacagatgtttcaccaaggaaaaaatacaaatggctaatcagcacatgaaaagatgctcaacatcatttagtcattaaggaaatacgaactaaaaccaccataatatatcactacacacctgccagaatggctataattttaaaaaaatggacaatactgagtgctggtaaggatgtggaaaaacagaaactctcataccttgccagtggcaatgttaaatgatacagctattctggaaaacagtttggcattttcttaaaaatttaaacttattatatgacccaacaattccactcctaggtatctacccaagaaaaataaaaatacatgtccacacaaggggacttgtgcataatgttcatatcagccctatttgtaataacaccaaattggaaggaatccaaatgtccattaactatgaatggaaaaccaacattcttacaaataattcaacaataaaccttcatgaaccttagaaacattattctgagtgaaagaaaccagacacagaagaccacaaggtgtaggactgtatttatttgacatttctagagaaagcaaaactgtagagacagcagatcagtgactgccaggggctagagacggaggcaagggttgatacaagcaggcaggaggttgctttctgggctgatggaaatgttcttatgctggattgtggtaatggttcacaactgtataaattaacaaaaaattatcagactatacccttacaatggtatgtacatttcatccaagtaacgctgctttaaaatttgaaattaagcacctaatgatattaagaaatgaataacaaaataaacccaaagaaagcaggggggaaaaaaagcaattggaaaagatgagagcaaaaataatgaaaaaaaaaacatctataatacatctagcggttggttccttgaagaaaaagaaagaaagaaatgaaaaaatcattaactatcctaataaagaaacaaaggagaaagaacaaatatacaaaataagaattgtgaatgaaataattgtagacacagaggatatcaaatgagtgactcctcaatccctctgcaaatagattcaaaatcttgaccaaatggatgattttctaggaaaatataaattaccaaaactgaccaccaaagagattttaaaaatcagaaaatatcgtttatcacagagatggtaaaaaccttgataaaaagtcatttacccagagaagcatctggttccaacagctttgcaagtgcatcctattaaaactttattgattggcaaacgctaattttttttaatttttatttttaattatactttaagttctagggtacatgtgtacaacgtgcagttttgttacatatgtatacgtgtgccatgttggtgtactgcacccattaactcgtcatttacattaggtatatctcctaatgctatcccttccccctcccctctccccacgacaggccccagtgtgtgatgttccccactctgtgttcaagtgttctcattgttcaattcccacctatgagtgagaacatgcggtgtttggtcttctgtcctttcaatagtttgctcagaatgatggtttccagctgcatccatatccctacaaaggacatgaactcatccttttttatggctgcttagtattccacggtgtatatgtgccacattttcttaatccagtctatcattgctggacatttgggttggttccaagtctttgctattgttaatagtgccgcaataaacatacatgtgcatgtgtctttgtaacagcatgatttataatcctttgggtatataccctgtaatgggacggctgggtcaaatggtatttctagttctagatccttgaggaattgccacactgtcttccacaatggttgaactactttacagtcccaccaacagtgtaaaagtgttcctatttctccacatcctctccaacatctgttgtttcctgacttttaatgatcgcccttctaactggtgtgaaatggtatctcattgtggttttgatttgcatttctctgatggccattgatgatgagcgttttttcatgtgtctgttggctgcaaaaatgtcttcttttgaaaagtgtctgttcatatcctttgcccactttttgatggggttgtttgatttttttcttgtaaatttgtttaagttctttgtagattctggatattagccctttgtcaggtgggtagattgcaaaaattttcacccattctgtaggttgcctgttcactctgatggtagtttcttttgctgtgcagaagctctttagtttaattagatcccatttgtcaattttggcttttgctgccattgcttttggtgttttagacgtgaagtccttgcccatgcctatgtcctgaatggtattgcctaggttttcttctaggttttaggtcggacatttaagtctttaatccgtcttgaattaatttttgtataaggtgtaaagaagggatccaatttcagctttttacatatggctagccagttttcccaacaccatttattaaatagggaatcctttccccatttcttgtttttgtcaggtttgtcaaagatcaggtggttgtagatgtgtggtattacttccaagggctctgttctgttccattggttctgttctgtctctgttttcgtaccagtaccatgctgttttggttactgtagccttgtagtatagtttgaagtcaggtagcatgatgcctccagctttgttcttttggcttagaattgtcttggcaatgcgggctcttttttggttccatatggacgttaaagtagttttttccaattctgtgaagaaagtcattggtagcttgatggggatgccactgaatctataaattaccttgggcagtatggccattggcaaacactaatgtttttaaactgttctagagagcatggagaaaggagaaaaccttccaaattattcctgtgaagcttgcatgtcaatgattccataacaataactatagaatcaaataaccacaataaaagaaaaacacagaccaactccacttatggatatagatgtaaatattctaaatacaatattagctgatagatctaacactgcattaaaagatttgtggaaggagttgttcaatattaggaaatccactctgtgattatctcaagttagcaattagatgtatattcaatgctgaaataacagaagcaccccagtttagtcagaaataagacccaattacccattatcaccaccaccatttagtattgcactggggaattaccaattcagttagacaagagtggggaagaggtacaaaaactagaaagaaggtggcaaaaacaatcattgactgtatgattggaaaaaataagagaatcaattgcaaaaccattagaaagagcaggataattcaggaagctcagggggcacaaaataaatgtttttacaaaacaatatccaagaatctatattaacaacaatatctttgagatataattgaatagaagattccatttacaataggaaaccccaaagatagaacacccaagagttgcacaaaatttacacaaagaaaatctaaacaacagagggacaaaacggaagatttgactacatgcaagtatatttcctagtcttgggtagaaagactcatctgcataaagatgacaatccttcctgaattaatctataaatttagtataattccaatggaaatttcccttgttttgttgttgttgtgctgtttttgttttgttttccagactacactgaatgccaaatattccatttagtgattttcttcttcccttttcctttctaatgacatattttgtgcttttcagacctgcctttctttctctcggcaccaatgaataaagttccagctttaaggcttgaaaaatcacagcaaagttgcagcaaaattaaaaggaaaaaaatgttctttttttttcctgcagctgcagagagtggcagatagcatcctgcgtgataaacgcctattcttggctaggcgcagtggctcacgtctgtaatctcagcaacttgggaggccaaggcaggcaggtcacctgaggtcaggagttcgaggccagcctggccaacaaggtgaaaccccgtctctactaaaaatacaaaaattagttgggtggtggcgcacacctgtaatcccacctacttgggaggctgaggcaggagaattgcttgaacctgggacgtggaggttgcagtgagctgagatagtgccactgcactccagcctgggtgaaaagagtgagactctatctcaaaacaaacaaacaaacaaacacctatccttgcctatgtcattttaacaaaggaggaagtaaatcccctggatttcagaggctgatgctctgcccaagaaaagcaaccctaacttccccaaaggctaaaattcagactgattggctctggcagagatatttaaattgatacctctgtttcctcaaaggtataagcctttgcgaactttctttggtttctctcttctctcacaggaggcaggggataaacaaatatgttagatttcttatttaaacaaagagcttgagggttttgcctcatcgaaattaacagagacaagttgatgctaatatttttatggaaaatcgaatatgcaaaaatagccaaggaaattccagggaaaaagtaatgaaagaaaatatcaccaaaagatgttaaaacattttggaaagccacagaaattaaaagtgtttgatcctagcatataaacaagcagacaaggggctgggcatggtgactcatgcctgtaatcccagcactttgtgaggccgaggctggtggatcacccgaggtcaggagttcgagaccagcctggccaacatggtgaaacctcgtctgtactaaaaatacaaaaattagccaggcatggtggcacgcacctgtagtcccagctacttggcaggccgaggcaggagaattgctggaccctgggaagcagaggttgcagtaagccgagattgcaccactgcactccatcctgggcgacagagcaagactctatctcaaaattaaaataaacaaacaaacaaataaataaataaacaggcagatagatcagtggaacagaataaaatccagaaatagactgaaaacattcaggaaaacagtataaaataaaggggacatttcaaatcaatggagaaaagattagttatctcagaaatgaatgggacgattgagtagactgggaaagagtaaaactggagctctacacacaccaaaatacattccagatggggctaagattttatatatctatatatgtttaaataaagccatgaaagaactagagcaaacatgagagatttatttttataatcccagacggtggcaatctttccaagtgtggcacaaaagtcagaaatcattaaaaaaagactgataaatccaactacacaaagttagacatttctttatggcaaaaaatgctatcaaaaagtcaagagatcaatgataatgggggaaacatttgtaacacatacaataagctgtccaattttttaatagtcaaagactttaacattaagaaacagaccagctggctgggcatggtggctcgaggctgggggatcacttgaggtcaggagttcaagatcagtctggccaacatggcaaaaccccgtctctaccaaaaatacaaaaattagctgggcatggtggggcatggtggtgcatgccagtaatcccagctactcaggaggttcttctggcttctcagcttgcagacagcctattgtgggaccttatgattgtgtgagttaatacttaataaactcctgtttatattatgtgtgtgtgtgtgtatatatatgtgtgtgtgtgtgtgtgtgtatacacacatatactggaatatatgtatatacatatatacatatatacacatacatatatatacacatatacatatatacacatatatatacacatatacatatatacatatatacacgtatacatatatacatatatacacatatacataaatacatatatacacatatatatacatatactatatatatacatatacatatattcattccattagttctgtccctctagagaaccctgatgaatacagtgggctacacacctattggaatggccaaaacccagaacactgacaacaccaaatgctggtaaggatgtggcgttttttatccgcattcattgctgatggtaatgcaaaatagtgcagccagtttggaacacagtttggcagctctttacaaaacggcgtgtactcttaccatacgatccagaaactgtattcctaggtatctacccaaaggagttgaaaacttgtaaccacacaaaaacttgcacacagatgctcatagcaagctttatttattattgcccaaacttggaagcaaacaagatgtccatcagtaggtgaatggataaataaactgtggtgtatccacacagtagaatattattcagtgctaaaaagaaatgagctatcaagacatgaaaagacatggaggaaactgaaatgcatatgactgagtgaaagaagcccttatgaaaagctacatactgtatgactctaactatgtgacattctgaaaaaggcaaaactatggtgaaaacatcagtggttgccagcagttgagacgggtggggggaagataaccaggtagagcatagaggactttaagggcagcgaaaatgctctgtatattactacgatggtggatacatgtcattatacagcaggtccttggatgacactatctcattcaacatcattttgctataaagttgatgagaaaaaaaagtcaattcctagccaggccactgtctctgtggagggtgtgcgttctccccatgtctgtgtgggtttcctctgggtcctccagtttcctcccacatcccaaagctatgcacggtaggtgaactggcatgtctacatggtcccagtgtgagcgagtgtggaagtgggtgagtgtgccctatgatggaagaggaccctgtccagggttggtgtctgccttgaccctgtgcctctgggatgggctctgccatccacagctctgaagtggaataagccagtcaataatattctcgcttgttttttgttgttgttgttgtttgtttgtttttgtgacagagtctcactctgttgcccaggctaaagtgcagtggcactaactcggctcactgcaacctccacctccagggttcaagtgattcctgtgtctcagcctactgagtagctgggactacaggcatgcgccaccatgcccagctaatttttgtatttttagtagaatcaggattttgccacgttggccaggctggtcttgaactcttgacctcaggtgatctgcctgcctcagcctcccaaagtgctgggattacaggcgtgagccaccgtgctcagctttcacttgtttgtattaatctttcctaaatgtatgtatggctcacatttatttcaatgtttagtattagaagtgtttgaggtctttgtaagtttggtgatgttttgtgaccagaaacaggccataggaacttaactcttgtttatattaattagcttatggtaaaattggataaatgttttataagagacatgaaagggcatacagacacacaggagagaaggccacgtgaagatggaggtggaggagacagtgatgcagccacaagccaagggatgcaagcggccacctgcagttgagagaggcaggaaggatcctcagaaggcatggagcctacgaggaagcctggccctgctggtaccttaattttggacttccagcctccagaaccatgagagattacatttctgttgtttgaagccactgatttttgtggtcattggttatggcagccacaggaaataagataatcacccacttaattttcctagaaaagctgtgttttgaaagtcctcttgaagcctgggttcctctctctgcatctcccagttttccctcaaagcttgtggattctccattcctcacattaactcaggcctttcattgccaagtgaccccgagtcctgccttcgcgggtgctgggggagccttcctgacccactggaagtggacctgcccatctccttgctgtgaaactgcatgagggggcttgtgtctgaggattgtctggcgtgaggggagagacaccacgtggggacagaggagtggatgagcaggccggggcatgacggggccgtgacagggacctggccttccattctgtggaagcctgagacaagcagcaacttctctcattcctcctctctatgacaagacaggaactgggacactcaccttactaccctaattcgctgagcctcggaagaaaagcagcttagatttttaatcccatccaagatggaggccctcctgctcctgctgccttgttctcaccccctttcgtgatgtgcgaggccatcggaaggtgtggaatttctccactgattcctctcattgtccctttctccctactcctggggaggctgcaatggtgacctcatccaccttcagaggcaggtgctggaggaggaaaggatgtgggagttcaagccggctgcagaggcccaagagcccagatggtgtccttccagcaaactggagaggcactcctcctaccaggcagccactgccccactccagggcccctggctcagctagggaagtggggctgggtttcaccccctgctcatcccctaaggcccagtgctggactcagtgcagcacctgcccagccatctctagcagcggcataaagcataaaatcaaggccaatgttacgtgctgccttgacatgtggtaaaatgtgaagggcctcaagtggcctaaatgcaagctcctgtcccacctctgctcccataaatagggtctcccagctgggcaacccttctcatcccagggaccaggtaccacccctgtttgttgccaagtagcaggcttcagttccctgccagtctgcggaattatttaacaacctcatgaagaaaccaggggccactccaccctctgtattagcctgttctcaggcagctaataaagatacccaagactgggtaatttataaagaaaagaagtttaattgactcacagttccacatggcttgggaggcctcagaaaacctacaatcatggtagaaggggaggcaaacatgtcctccttcacgtggcagcaggaaggagaagtgctgagcaaaagggggaaaagtcccttataaatccatcagatctcatgagaattcactcactgtcatgagaacagcatggaggtaacccccacatgattcaatcacctcccactgggtccctcccacgacatgtggggattatgggaattacaattcaagatgagatgtggaaggggtcacggccaaaccatatcactcttgttactaccaaacctgctgtccaacaaccctgctgttcactctgctcttgagcaccacctcatgtggccctgcatagcctgcagtggcccttcccctgggctacgagtatatgtgactagaaaattgccgtgggtctcacctatccagtgttgggtgttgtgtgtccagccctagagtgggactccttccctcacgaatggggtgaatagaaggtgataaaaagatctgagtctagggatacctaggaggtggaatctcttctccatgcatagcatgagtgatcacaggcctgaaaccaaaagggacttaggtctgggggagagattattttccaggtgctgaatattcctgggataggggagggagctaaacaggttcctgcccaaaggaagtgagaagggggtcctagcaacttctcagggatttagagctgtgactccagggcctttgttcagaggagctaccttgcaaggaacttctagaagaatgcttctctttctcagcatccatcctcccatttcatagtcgtgcccacgatgggccccgtctccctgaacttgatggctgaatagaagtgtagcctcccaggggcatctaaaggcactcagagccccttacccagccccagcaggcacctgcctggctgcccggtcctcagggttccctgtgcattgagcaatatcctcaaagtgaccaccagggggcagcagcacccagactgccttccactgcacctgcagatcaacaaattccagtattttgggggaatatctgtgataacttggctactgctttactgacctcaggtaaatagacagaccaatgtgcttgaggagccaattgctttaaatctcctgactcattttttgtattaagatttgttttatttatgcaattattctgtttactcaaagactttaccagaagctgggtgcagtggctcatgcctgtaaccccagcactttgggatgccaaggtgagaggatcgttggagcccagacattggagaccagcctgggcaacatagtgagaccccatctctacaaaaaatttaaaaattagctgggcgccactcatggtggctcaggcctgtcatcccagaactttgggaggccaaggcaggtggatcacctgaggacaggagttcgagaccagcctggtcagcatggtgaaaccccgtttctactaaaaatacaaaaattagctgggtgtggcggtgggcacctgtaatcccagctactcgggaggctgagacagcagaattggttgaatctgggaggcagaggttgcagcgagccgagattacaccactgcactccagcctgggcaacagagtgaaactcagccctccatcccgaccccagaaaaaattacctgggcatggtggtttgagtctatagtcccagctactcaggaggccaaggtgggaggatagcttgagtctgggagggtgggagtctggcttgagtctgggagggcgaggctgcagtgagctatgattgcaccactgtactccagcctgggtgagagagccagaccctatctcaaaaaaaaaaaaaaaaagtaccagcccctatctacccattcatagctttatgtccatttcttttgtcttcaagcactggtatcctttacttatctctcctcacctgatctagtgtttacatctcatttgcgcccatagagaagtcatacactgatgtggattttagatagggcacgctctcaagacagccacatgtattattctgtgctcacacagcctggcctggagatgcaaagattatggaatccagaatctaaatgagaggatcagattaatgggatgttctcacagtgtcaggtgaggacagcctgatgcagcctttcatcatgaggctgggacctctgggtcccttggccccaggaccacactcgaggacatgcctgttcctgccaacatggctgggcagagttcctcttttctttccttttcttttcttttctcttctcttctcttcttttcttttttctttcttttcctcttttccttccttccttccttcctttcttctttcttctttctttcttttctttctttttctttttccttctttctatttttttttgaaatggagtcttgctctgttgcccaggctggagtgcagtggcacactcttggctcactgcaacctccacctcccgggttcaagcgattctcccacttcaggctcccaagtggctgggattacaggcacccaccaccacacccagctaatttttgtacttttagtagaaatggggtttcgccatgttggccaggctggtctcaaactcctgacctcaggtgatccacccgcctaggcctcccaaagtgttgggattacaggcgtgagccaccacaccctagccctgagtctgtttatgcttctgtcaggtgtggcatgggcctgcctgggagctattctttttctgtaaagcacaggcagttaatcagtggtctctgggaagaatccagctcagggttatatttcgtttgacccactcaagttttaaaaagtaaattagttgccaatgtgcaaacattagaagagttcacagcttctccaacaatacctagaagttcatccgatggtgcccgcattccctgctctgtctagatggtgcccacattccctgctctgtctagatggtgccgacataccctgatctgtccagacagtgcctacattccctgctccatctggatggtgcccacattccctgctctgtccagacggtgcccacattccctgctctgtctggacggtgcccacattccctgatctgtccggacagtgcccacattccctcctccgtccggaaggtgcccacattccctgctgtgtctggacggtgcccacatttcctgctccgtccagacagtgcccacattccctgctgtgtctagatggtgcccacattccctgctccgtccagacagtgcccacattccctgctctgtctagatggtgcccacattccctgctccgtccggacggtgcccacattccctgctccatccggacggtgcccacattccctgctccgtccggacggtgcccacattccctgctccgtccggacggtgcccacattccctgctctgtccagatggtgcccacattccctgctccatctggacggtgcccacattccctcctctgtctagacagtgcccacattccctgctccgtccggacggtgcccacattccctgctctgtctggacggtgctcacattccctgctctgtctagacagtgcccacattccctgctccatccagacggtgcccatactccctgctctgtctagatggtgtccacattccctgctccgtctagactgtgcccatattcgctgctggctgcaaatgcgaggagttgacagcagcctcccctttacaaggcaggaggtgccactgttcgccattgtctccacctagggcttcacttgctttctatctgcagacatcagagggacccacatctctctgttctgacacgctgtgtgttgatggcagagtttaattatccacatgcaatcttactttccttattcccaagtccgtggggctgcctcatcaaagcattgtaagaactgataaccatcttctagaagtatcatagtgatattaagaacacacatcacagatcatagtaaatggctttaattttttaacgaaatctcactactgcaaatgcattgttgtcctagctaatgaatgcacagagtattgcctgcaaaataataattgagattctatttttaagaagcttagaacagtacatggtgcatagcaaagactctgtgtatgtgaagccagattttaaaatatggtaacaagtgtctgaaaatatgtggctcaatttgtctcccggttacttttccctctccccctttaaaatgtagaggaaggagaagaagagataagaggtttgtgagtgaagacaagggccctttaaggcctgggaagactaacgccatagggatctccctctgccttaaaaggcacaggaatcttagtggggaaaaagaagtggtgataaatagccagtccgtgtgcctggaatatcaaagtcagtgcgtgccagggatcacactgcgggtcacgtgcactctgggtctctctctgcaaacctgccctgcctcagtctgggaatatgcaactgcctaagaagggtctggcttacacaggggccgtgagacgtggcaggcatagctgggctgctactggtcatgaatcctggacacggcaggcaaggtgtggtgtccatatgcattattcgggtggggcaaagatcacagctctcactagactttcagaggactttgtaacccaaagaaccactcatctcaaggactgtggtaactcaggggctgagccatgccagtgtttattatgtgaaacaaggactggaacctcacaagaccaagtctgtccatttgaggatggcccaagatgcacacgggctgcttttatcttatgcgcaggttttaaaaaaatatgtttcatttaaatattccatactcttcaggaatgcccaggcagctgagctttcaggatgtcgcattgcagaggactccaatgctacatatggcagctggagaccctttcaaggcaggtggcagaacggaggccctctctatctgctggggcagcccctccgggtgccccgctggaaggcagagcagctccatctctgggtgggtgagaggtgctgcatgggctcactatagtatcccaatactgtatggcagtaggctgccagagtatcctaagctgggtggcttcaacaacaggtactgactcacagttctggaggccaaaagtttgaattcaagcagggctgtgcttcctctgaaacctgtgggagaggagccttcctggcttcttcccgacttcttgggatggggatgcgcatccatcctcggccttccttggtttgtggctgtgtcactgcaccctctgcctctgtcacggcatggtgccctccctatgcatctgtgtctgaatttccctcttccgataaggactccagtcatattgggtgagggcccaccccaatgacctcatctcaactagatcatctgcaaagactctatttcccaattaggtcacattgaaggtacctgtctttttgggggatacaattcatctcacaaaaccggcccatcacctcaaaaggacctgccaccccagtgctatgtgtccctctctgcccagagccactccttcccctggctctcggggagtgggggcacctttccctgctcccacagtgaccgagcaccttccccttggtatgcattctgaagggggcatttttttctcctccatctcagccctgtacaaagcaagttctttctagattgaggtgtgtatgtgtgtctatgtatatgagtgtatgtgcctgtgtgttttcagggagatgtgtgcaggatgggtgcaagggaggagtggaaggcggaagggcaggaggaggatagagccacaagagtgagcacagaagtgacaagggcagaatcagtgtgtgcttgtgacaagtatggaaatgtcatgcctttaggttcagtcctataaggtaggtgtatcagtaagggcattgattctgcgaccttaacagagatcagaataacagtggcttaaggaagagtggagtggatttctctctcctgtaaatctggcctggtgggtggtaaggaggatccacgtcgcccaggcccagatgtgtgtggctctttgagtgccccattctttcccagtctcataactgctctccacctcctccacatccagccactgggaagcaggacaaagttagttaagggcacgttcttttctttccaaggattacttggacattacagtcttcacttccatgcctactggccagggcttagtcacacaaccttgctagctgcaagggagtctgggaaatgcagctgctattctcagaggccatgtcctcagggattctgctaaatttagcaaggcagggacagatatgggggaaccactgacagtctatcacaaaagaacgtgattttagagaaacagtgaaacagtgtcattaatccaccccccaccccttacaacagccaaaaagaaatccagtggtatccatcacaataaagagtatgagaggaatgtgattagaaaatcaggttgccaggcaggatgtgtccagttttagccagtggtggggttcatggggaaggcttcgtctcaggaaggtgtgtgttgggttgttctatggccagatggttttcaacgacatagcacgacctgtagctctccaggacccgggcctggacataggccttgtccttctcttgccaggcattggactcgatgtagacgttgaatgggtcgttcgagtgctccagcttcttggagcggatgtagctcagcatgatgcccagggtgaagaagccgaagaatcccagtaccatgaggacgtagagggcctccagcttgccgtcaccgctgcggggggacctgcgggccaggcccgacatgttgccaccctgctgaactgtctcctgccacagcttggtcagaaagggcgtcaccgctgtggtgttagacaggatcatcctgggcattaaggttccactgctgcagctcaaacttcccaggcacacctcttaaaggaaaaatgcaaccccaaatcaaaaagtacgtattggccaaaacccacacgtacgcacacacacgtatacaattttaaaatctcaggtgagaggggtgagctgacactccacaggccatggcgtgtgccatcttgggtctgtgcaatgccttctcttgatagatgaatggatacattgattcccttctatttccatccaccactccaatctccacccctataggtgaccatcagaatgagcttctttaatatgcattgctgcatattgtggcgtatggggtcgcatgtgtgcattttggtttacctaaatggtatcaggtcatccaactcattcagtctccttctttttcctcatgactgtgcttttgtggctcacttgtggtgctgggtgtgtgcattcccttgcttccaatgtttgtatacaacccatggtgaacacccacttcttttctctgccttctcccccagagatggacactgctgtggctgctgactccataaacaagggggagacaaatatccccatccttgacctcctatggacctaaaaaaaatcacgcatctcatacaactagttcctggcggcttatgcaagactagtcagactggttgcccttggaagcaacgtgcaattggtggtctgtttcaccacagagcatctctctatgaacagttacattcatctgaatgaaaaatctatgctgtcacgtggtggacttcagaatgtctagggagatttcacagagagctcccctcgaagaggccagtgctgtagcttgtgctatgtttttccctccctgcccacacacaggcacacacacgtacacaatcttaaaacctcaggtgagaggggtgagctcacatgctccctagtccatggtatgtgccgtcttgggtctacacaatgccctctcttgattgagcaatggtacatggattgccttttatttccattcactactctctggctatgcagaaagtgacattttccctatcgtttaatcttgatatcactgtccctgtatactcagagtgggcctgggaattggaaaaattgtctccaagtagctgtaagattctgtcaggggtttggtttgctgtggaaaccccatctaggtgaccttgagatcattggtaagctgaaaaaaaacaggtcttgtttttatttatttatttatttatttatttaggtttgagcaaatgccagcctctacccccagttcctgctgggaaacaaaagctccgaggccaagttgttgatgtcacattccaaactcaagccagagggggccactgggagcttatcacacgtaagtgctcccactcagttctttctttttctgttttattgagacagggtctcactcttgtcactcaggctggagtacagtggcacaatcttggctcactgcagcctcaacctcctggactcaggtgatcctcctaccctaccctccagagtagatgggactataggtatgcaccaccatgactggctaattttcgtattttttgcagaggtgaggttgccctatgttgccgaggctggtcttgaactcctgggcttacaggatccgcccacctcggccccccaaattgctgggattacaggcatgagccaccctgcttgtcccctgctcacttcttaggagcttaaagtagctgagtagaacatggcctggagtagaacatggcctcggggggactgttgtaactacaggtgaaggatgtatttgggaagacagtttatggccagaatcgctatggaaagacaaattccaacacttgccaggacggcgctgtctttcccagccaggatggggactgtgacattgcacatcatcttgtgtaggacaaataacctcagaaacctagctcctctccagcttagacccagagctatttcttcattgaattggtttaattgtaaaacataccctgaacccagcaccagctgaagacatctggcacctttccgaggcccctcttcctctacccatctctgaactgtggctgtgtctcagagttctgttacctgctctcttctcttcctactctcctctctcccagggtgactgcacctgctccaggctcacctgcatggccatgacccagggctctctttaagctccagagccatgcgtccagtgacctgctaaggagatggttccctttggccatccccaggctccttaaagttaacactccaccctgtcctgtcagagactggcccctgcctcactgagctgagtggcaacaccactcactccaaaatctgcatcactctcactgatgactgcaatctcatcatggcagttcccatcttgaaggccttccttggctcctccctgccttcagggtgaaactcctggtcttctgcatggatacaggccctaaatttgagagtctatgcatccctctccaattccactgttgccactgtgcccagaccctatgctccatggtccctgctggccccagagcctctacacattgtgcgtctccagctcagactgcgccttcttcttggcccatgaaacttctcagcaatgcctactcatgcttaaaattcagcccagctctcacctccttcccgaagcctgctctgatacatggggctggatcagcactgtgcacaccatgacccctgctaacctcatcatggtcaggatctccaggccccttatcccatccctgccctgccatccagcctggtgctgggcacgcaaccacacaggagctgcccatgaatgtttatcgaatagatgccaccagaacttaataccttttgaccagtggggcttgactctttataacctgcttactccaatgaacagatgccaatgagctgtctccgaagctctaactgactcccttttccagaagggcagtcatctcccaccctgaaccacagtctcagaaggcaggagtgaggagcagaaagagctcagattttgggattccactgccgccacaggtttggattctagctttgctacttcctggccacatgatcctggacagtttccttagaattgttcagtcaagttttttttttttttctttccaaagtagcgagaaacaccactgacatttgcgggctgttgaatccctgagcaggtgtgtagagtggctgacagcatgtggcacatggcaggtgcacactcagtggtcctgggtaggagtttattggtttttctacctcattaagaaattgctgcccaaggatttggggctttgggggtttaggcttggctttcctgtggctgaccatggcggctgtcttctctacgttgtggagagatcagacatgaatgagaatcaaagattgtttgtggcctttcctggtttctaggcttttgagtctgtgcagagatctgtcaggggttaagctgcctgggctcaagagattcaggtccttgttcttgtacaaaactagcatttagccccattctaaccatcggggtaggcaggaattgtttggtaacagatccaaactcaacgctcaaccatttctttttaaatgacccgaaaccacttatgaatgcataaaaccctgccccagaaaacagacagacctggacctgatactatgatgtaatttccaaaaacccagaatgatcacaattggcaaataattctgccaccaatcactgttagagagtctttccaacttcatgaccatgtgagggtagaattatggcaggcgacatttgaagatccacaagttaattggtttaaaactgataaatccatacagcaaattaagagttacatctgcaattaattcataatagtgagttcactgagaaggcttgttacttagatccagatggactttcttatgtccaaagaagcaaccaaaaacatctgctttgaaaacctcccaagcccaaaccatcctcagccttgttctttagaatgctttagaatgaccttgttaaaatgcagattgctcctgtaatcccagcactttgggaggccaaagcaggtggatcacttgatgtcaggagtttgacaccagcctggccaacatactgaaaccccgtctctactaaaaatacaaaaataagacaggcgtggtggcgggcacctgtattcccagctatttgggaggctgaggcaggagaatcacttgaacccaggaggtggaggttgcagtgagccaagattgtgccattgcactcctgcctgggtgacacagcgagactctgtctcaaaaaaaaatgcagattgctgggctctattttcagagtttctgatttggtagaactggagcaggcctgggaatctgcattcctaacacattcccacgtggtgctaatactgctggtctggaggccctgcttggtgatctattggaatcaccgggggagcttttagaaaataatggttcctggatctcacccctagagattttaatgtctttggtctgggttcctgcctgactcagagactttttagaaacctcccaaatgatcctaatttgtagccaagattgagaaccactgggctgtggtgtgggaccctaggaaaatgaccaatggccttttgtgctgcagggtacctggaagaattttgcaaaaatatagaaatatgatctcactgactgtttttcaaatcttgtttgttttttacattttcttttttggccttgtttgcctctgatacagtctgaaaagaaattgcagaaagaaactctccagtcttcagtgtaacctcagctgtccccagtctcacacacgctggtgccttcaattacaattctcctgtcagagcttaagtccggctaattaactgcctttcaaatgacaaccctatatttttaaagaatttttttaaaacttcacatgtaatttattgcattgcttttgctaaatgtcctccacacccccaatgcctgctaggctgggtcgccatggtatttttgtgtaacgagtctcaaaatgagtttggcaatgtctccgtaatagtcagcatggtgtaaatgacagtctggatctgcatgtcatttgggattttatatcagattctctaggttcatttctatgatacgtgatgccaaagcacccacatgccccgtggctgcactttcagacagttggactcaaacagagtgggagagcaactgatccaacaatctgaattttcagaaaacggggctccttagagatgagatggcttgccaaaagtaatctctcctatcagaagtacatatcctcagcaaactaacgcaggagcagaaaaccaaacaccgcatattctcacttataagtgggagctgaacagtgagaacacatggacacagggaggggaacaacacacactggggcttgtcggggaaaggtgggtggggaagagcattagggaaaagagctaatgcacgctgggcttaacacctagatgatgggttgacaggtgccgcaaaccatcatggcacatatttatgtctgtaacaaacctgcacatcctgcacatgttccctggaacttaaaaaaaaaaaaaaagaaacaaaaacaaccaaccaaaaatatatctaaaatgtcatctgttagcaattgactcacatattattagtatagaaaagagcaattcccaggaccttgtacagaggaagcaggctcaaaacagctgaggaataggccacttttatcagatagcattggatccatgcacatgggggttggcttcttacctaaatatgccatcagaaatcatccttgttcctgtcccctcagcttttgtagcttgcacagtgagtaaagggatggtggaggcagaaatggtaggagccagagatgttcaaaatccatctgatgcttggcctgtgctgaacgttctcaaactgtggccttgtcaggcccagaaagtggggtggattcctggccgtttctgcttctgcctgggtgtgagatgtgaatgctgcccctactgaagggtagtgcaattttttttttttcttaaaagcttagacccagagctgctaatctactggaaatcactcaggacacagggctctgggcagctgcgctgagcgagacacctgcaaatggagaccaacggggcctccagcaccctggagttccgtaaggcccccagctgaacccaggggagaagagggcagtgggtggcgcctcgctgctctgggcacacaccacctcttctgacttctcccacgtgctccggctgtgtcgcctatcagcactgataacagcctggaagctttcagaacagaagctttcccagcatgggaaactctcattctttcttttttttaattttccaaagcctttatttctaagaccaactgtggcctacccgtgcataaactgggcaggctgtagacagcaggcttgccaagtaaatactacagccttcctcccaatattgagccctgtcccattgatcctgcaggggagatgtgtagggcatttgttcacggggaggccacaagtttgggcctctcatcactgtgacctcacacccctgttgagtgtgtcgtaaacagaggagccgttcttcaagccccctgccctgagtgcacccctctcattcttttgttattattagcaaattcccccagttcctgatcattctttcttaagcctttagtgactgggtaaggttcttgtggctgactccaagctttcttctaaaaggaatagattctaggggtgagtagaggagacaggaatgtcggagtcagagctcaggaatctgggttccagccccaggtcaatcctagataaactagagggctccttaacttacttccctaggttgactctgggtttttttatcacgctcgacaggactccttatgcatttcttcgaaagagcatccagtcttaacatcatcatttggcctcatttggtttaagaagcagaattagggtaaaagcaatgatggataagcctcattttggtgaatatgatcttattgagacaagaattctgagtcaattgtccttggaaccaactgtctattgttttcatctttatcacaacactatgtccaaattttggaaacatgtttccctcctagcagaaaagaagccacccagggccaccagatgcttcccgacacttggctggctttgtctggtcttctatccttcccctatccccagagtcagtgggtactaaggtggccagggtcgctcaaggaatcagaatgcaaccgtccagaggcccagaatcagactgtcctctctgattaggaaagtgtttcctgccacctcccagggggatgtggggtgtggcttgagtctggtgcttttaccaggagcttcccagacctctctatgggtgatggagagagagtctggggtgtgaaggatggaaatataaacactgaatactcagagagtcaggccagcgagctggtgaggagactccatcaaactcaatatgaaaacatgggtgggcgtttggggatggataatgaatgacagctgaagtcacacatcaggagggaaggaaggactctcatcttcagcaaatgacataaatctggggagcctcagtttcctcacctgaacagtgagaatgatggaatctaccctgagtatatatcccaggtctttgtgcagcatggaatcagcccccagccttcctagctcttgctttattttattttattttagagaccaagcctcgctctgtcactcaggctggagtgcagtggcgcgatcttgacttactacaacctcctccgcctcctgggttcaagtgattctcctgcctcagcctcctaagtagttgggtttacaggtgcatgccactatgcctggttaatttttgtatttttagtagagacggggtttcaccatgttgcccaggctcaacatgcctgggctgaagcgatccacctgccttggcctcccaaagtgctaggattacaggcgtgagccaccgtgcctggcctcttgttttatgtttgctgttctcgctgtaggtgaggcattcccaccatattcccttgttaaaatcctactggcccttcaaatgccagctcatatccacactgtgtctgaccctgatccagaatcctctccccttctttgaccccttgtatatatctttcctacagtgctggtcatattctaacttctaatcatttgtagacttatctgggcattttctcccaggaggtcccaaaggacagagaccatcttgctcacctttgtccccactccagcacccagaatgtttcaataaggttttcctgaattaagtgggaagcaaagtattagattcaataccactacaatgggaaagtgagtgaataattgataaagtatactatgctctggaaatagattattgagtaatcagaggaaaacctcttgcaatgtagtatgtttttatatattaaattttatattatttatttatatttatattattaacatatttttgttattcattttgtttattaagatttactctatatatatatgtgtgtgtgtgtgcgcgtgtgtgtgtgtgtaacccaccttatttctaaaaaaaaattttggcagtcagtgactattaatagtagagcacaaactcttaacctttttttcctcccgctttcccagagtccttatcaccttctaatataataaagttttcttaactgtgatgttgattgttcaacgtttgtctttcccaccaaaatgtaagctattgcgggcagggatctttgcatgggttgttcttcattgcatcccaggccactagaacagtgtgtggcatatggcaggagtgcaataaacattcagcgaatgcaggcaggcatgcgtgaacgcatgaataataagtgttcctttcaactaccagaaagagcgaaaccacacaggagctgtctcaccctcagagatttaagacgacagcaatgagtccctctgatgtcttctaagtgagctttattttcaaaacaaatcattttccaataacctatcaaaagcaggtcctacctgaatatccttggctatttcctctggatacagataatgccttcctccaatggatcctcggctcacctgatgattgtgtgaaactggccagagaaagcagagggatttttcctggtgattggaaatcagagtcacggctgaatttaagcaactgtgtgaactcagcaaagtccccaccacctggaccatacatgacagctatggttattgacaaggtccttccttaatggagctggaacctccttcttaatctaaatgtggactcaaatgaactgtcaattcacatagagcaatgtgacaaatccggggggcaaagcattatgcaatagattgggcacatgcgcacgtctctgctacttagtcaactttcttctaaagtttcccacttttcccattaccacaatcaagatcagatatcagtaatattctccgcgtcccatgccctttcctcagggagatgccaaggcccaagagctggtccccccaaaaagctgaaggtctttgaaaaaaagtggggactcaggtcccgtgagtggttttgattttcttttcttttgaaagttgcatgtaagtgttttccaaatactatacaagaatgtctataacttaataatggaggaatgttttcgttgttctgtgttggtgagatgctttcctatgcgtttgttgtataagtaagtgagaatggcagaaggaaaggaggggagaggctgatcatcctatcccgtctcccactctgggggtctcggcgcttccagcctgaagcgcgcccgctgcgcgtccggagacgcaggttccaggagccccccggggttgcccgactaggccacttgcgccccggaagagggccgcggaggtgggagaccctaacttacccgggtctgagatgccgagagagccgggtgtggagctgagtgcgcgcctgccgagcgctgaggccacagacagccccgccccggggcggcaccttctaagggcctgagcgctgcacagggatgggggcgggcggggcctcccagagccgccaggcgtcccgccccactccgcccacacgcacggcccagcccagggttccccgggaccaccccagaccagccccggcccccccgggtcctccacactctgcaccccagaccaacaccaacgcgcgtagggaagcgttttagatcctgtcggagaggctcaaggccggcagaaggtttgcattaggatcgagaaagccgaccaacggacagatctacctaccttcctgcgggagtttgaggttgccaggggggaagccactgcagccaggagaaaggccgtctgggaaccaccccaccctcggacgtgcgggccttcaaatatctctgaacataatcctccaaagaccgctcaacctccgctcccgacgactctttctagcctcgtcccgcaccccagctgtggccacacacctattaggcaaacatttatgaagcacccacttactgggtgtgcagccctgagctgggggtgcagctgtggaccagacaggagggggcccggagcggcagacagtcgctggaggcacccgagccttggcgagcacaccctaacgtccttggggcctttcagcccgagccgtccttgtccagagagcaaaccatgcaatgatgcaggtgacttcccagcaaatttcatagcgttgctcaccagcttggcaggcaagaggagaaggggcagtccccaaaagacaatcccatgaaccttctagggaatgacgtccaggctccaggctcctgctctgcaggcgggtcgcagaggcaggttcctgacctaggactagaagacattctctagggtcactgcctccatggtcttccttggcaggtcacttcttcctgggcttcgacctcggtgttctcatggggacgagggtgattggaggccctccaaggggtgcaccgatgtgtcctgtgcaccaggcagaaccagcattgccctacagtgtgggtgcaaaatgaacccacatggccacgttggaaagtcctgaaatgttcatagcctatgacatgaaattgcactgtgtgaaatctatttattctttttttttttttcttttttttctgagacggagtctcaccctgtcgccccggctggagtgcaatggcacgatctcggctcactgcaacctccacctccctggttcaagcgattctcctgcctcagcctcccgagttgctgggattacaggcaccggccaccataccctgctgattttttgttatttttagtagagacggagtttcgccatgttggccaggctggtctcgaactcctgacttcaggtgatccacccgcctcggcctcccaaagtgctgggattacaggtgtgagtcagcgtgcccagactgaaatctatttattctatggaaaggatcagagctgtagaaaaatccttatgcatgtaaaagttctttgtgtttttacttgcaataactagaatctaaacatccaaaaatagaaaatataggtaattaaattgtagtacatatgatattattctacatagtagaatattatgtggagtccttaaaatgtttacaaataatttataacaacatggggccgggcacagtggcttacacctgtaattccagcactttgggaggccaaggtgggtgggtcacctgaggttaggagttcaagaccagcctggccaacatggtgaaacctgtctctactaaaaacacaaaaatttagctgggcgtggtggtgggcacctgtaatcccagctacttgggagtctgaggcaagagattcacttgaacccaggaggcggaggttgcagtgagccaaggtcacgccactgcactccagcctgggcgacaagagtgaagctctgactcaaaacaaacaaacaaacaaaaacccaacaggggagatctttatattatcatgttacgtgaaaaatacaaaaacagaaaacaaaacaaaaaccccacaaaactcaaggccttaaattgtaaatatgagatgccaggcattattcccaaaatctataaggaagcacaccaaccaccatgttaacattgtctattagtggtaggcctattggagatttattatcttatttatgctacttcatgttttccttccttttttgttttgcaacaactctgtattagtctgttctcacactgttataaagaactgcctgaaactgggtaatttataaaggaaaaagtcttaattgattcacagttcagcatggctgaggcctcaggaacttacaatcatggccgaaggggaagcaaacatgtccttctttacatggcagcaggagagagaagtgcagagcaaagtggaaggaaaagccccgtataaaaccatcagatctcgtgagaactcactcattatcatgaaaacagcatggaagaaccgcctccatgatccaatcacttcccacaaagtccctcctgcaacatgtggggattacaatttggattacaattcaagatgagatttgggtggggacacagccaaaccatatcaaactctatgtactttaatatttaaggaaaattacataaactttatctgaaaattccctggattcttctcctcaaggtcatgctgtacatatgcaggatcctcctgcctacatctccaaatggataatggattgaagcaaaatgtttgtcccaccaaacattgatgtgtaacccttttagtaacaattcatagaccaggtaaacatgtgtggagcagcccagatcagctggagggagcattattctcatcagagtgtggaacaatgcctacccatctgtcagctggttatggtgaagacagtataaatggaagcactgtcagaaactaaaggcttatgtaagtgatgctgttcttatgtctcctcttcctctctatcccacatatgatgaattattttattatgatgatgctgtagttgttattttctatttgaaatgaaaagacatgattacagatgagaaagagtgtattttgttatccttgatgcacttgaaatggtttcctcttttttttttcctgttttcttcttcttccttctctcttcactctttcattcttgcctctctccattttataggtatgattgatcttgaaataatgatgataacagaatgatagcccatatagtccttgggtcacttctgtctctatttctctttcttccctcctctttttttcttggtccttttgctagatgggttgcgagcatggctccctgcccctctcagtgggtttatcttcattttccatgagctcccacctcactgcatgtgacatcaaagccaaagctccagccacttctcatcctttcttaggaaaatctcaagtcttaacttgaaagttgaatgtcctgcttttgttcctaactctgctcacaggatagtggaagaagaaaggctcagcctgttaccagaaagaacagatctgcagtgtaacccatctaggatgaagggtcatgtggacagttcttcactcttccctctggctgcccttcagttggtgtccagatgcccctgtgttagcctgggggcattccttgccctttggcccctcttttgttgcctttttttttcttagacaaggtctaactccgctgcccaggctggagtgcagtggtgcgaccattgctcattgcaacctcgaactcctggctcaagacattctccccgctcagcctcgtgagtagctggaactacagttgtacaccaccatgccttggctaatttaaaaagtctttttgtagggatgggagtctcaggctggtcttgaacttctggcctccagtgatcctcctgccttggcctcccaaagttttgggattacaggcgtgagccattgtgccctgccctttgttgctttttcactcctttaccctgtggtttctactatcctcagggacaactctcattgccctggggcttctggatcttcagcaagacacacccctaaaggcaaacaatctttctttagcagcagcagagcacaaacggagtgttgctgtatgctaaaagcatactatttcccccccatgagaaagtctaaggggtccaggggtcctgaagtccctatcctgcccccgccagtgacaggtgatggggaacagaatgctgaaagagaccccacccaaccatctggtgtgtcaacacccgcccctgccggtgctgtccacaggttgatccccatcccacatgggtggcttaacacattcatgtcttctgagagccatttgttgctccccagtctcttctgtcctccttctttgaccaacatttccctgtctgatttgcttggtcacaggtagcctgtgtcagtttcctcccaggactctctttgcctgggaataagtgctatacatgagaagcatccctcccaagcgctgtgtgtggcctcctggcattctcctaagacttcctagaggattgctctggttccaaaaagaaaccagccacaacctgtttggagccctgcaggatgttccagctcaccgacttcattccccactacttgcccctctaacagagcttctagaccagcagccaaggtgcctccattcactgtacatgactcacctttcccccttctagacacttcttcacgggtctagcctctgtttccagctttacacagcacaggctgatgcctgccactgaacgggatccaggactttttcaaatctcagatccccagcaaaggtatgacaatgggcaccctgaccagctctgagcctctaagcatagggtctatttgtttaattttgaattcacttttaagatttaaaaattgagagctctcatcttcaacaaaattcaggggatctagaaacatcatgcccacttgtggcagagtagccaactggcagaaactgatgctgatgctgtctgtttcctacacaaaatgcaaaccagagtttaccacaggccccgctactccacattctcctccacaaggacactcagcaggctcctgtgctgaacggcttgcctggttctgtaggtgtagggtttgttactctgttccaggacctattttccgcaaagccccttacctggctgtttcttcccttggcatacgtgagaactcctttcctcactgaattgctttgaccttgctaattagttgtgttgcaagtgctttttggctgtgtcagacatgtatgttctgtttatcattttagagcaatggttattaatttttttcagattcttcttgggaattagagaaaaacttatggctctcctccaccatcctgcccccacctaccccaatgcacacatgtgcaacatttgttctacaattcaagagctctctagacccctgatatgctaggcaattcgtggctgccacattaggaacccctgatttaggggaaggactgttttctccattagacaaactcaactgtgtagcatcaatttcatgggtctactgtgtactgtgcccaaaaaatgccactgaatgctgcctgactggtggatagcaagactgtccattaatgtggtcatttaggttgcctctgcccaggtcttgaggtcattggcactaattcacaacaccctcaagtcacccagggaagatgagacacagttggctgtagacccacagtttgggcattacagctgcccttgaagttgacaaataaccacaaccttcaaattgttatgaaaagagcacaaatccaattaagaaagcttttccaaaagaaataacagtgttcctaccccctctgtcactctccaccccctttttgtcccagaataatgttgtgctgataggaacatggataaattaattacagtctggaatgttattcatgggtaggaaagaacactaaatctactcgcacaatgtttgatatttaaagataaacattgcctttatgttttttttttaaacctcagtcagcctagtttacgaagacataggtataatccttttaaatgctgtggattttttaatcgcaaaggtaacaatatgctgggtgttttacccagccagagaaccaggagatgcaggaatgagattagcatctctttagttccttgcatatttgatattattttggtgtacctccaattcctgataacatagaagaactcttgtggttgaagtccctgaaatggaaggatattggtaaccctgaatttaaaacaagcacaggcagcctttgtgggaatgtgtgtgaaggtcaccttctagaaacaggactgtccatagccattgccatggtttctgtgtcatttcaaccagaaccttaggcctggaagtctggatggatgtgggttggcatggtcctctatgggcattaaatgaataaatggatatagcagagggagtatccagcatgactcaaagaaggatgagaggaaacatattcaaataaaatctttagaaaagcaaatttcaaaaaaaaatgcttaagtataaaatattttgatgacaaccatgattttcaaattgaattcttattctaagtaatggtctaatctgaacttagacctctttccttaatttttttctcaataagcctttggtgtctagtcagttcaattcagtatttactgagtctctatacagacagggtataaggcattaatcaaatgtatgtccaaaattgcccaccatgcagggcagagctaaaatgcctaacacccctcctctcaccaacacatcccccacccacatctccaaagacttcctggcagaggtgatctctgcctgctgggacagatgtataggctccaacagcagcagggtggcccctctgaccaccaccttgggacccacattgctcttagaactattcctcttttttcatccttgaagcccccagcaaagctcagcctgaatcaactttttctaggaatctgacaagtttccaggctgatttcctgacccagtcagatcctcttccatctttctttgggtgttcaattttctacgtcattttccacctcacatattggccgttgatgaccacatcagctcttctatgctgtaagctcccaaggaacaaattctatcaaatgattggcctttcagctctctactgtgaccagaaagttgcccagtacataaaaaggggttcacaggtatttctcacgtggataactggtgactcatctatccatgattttggggatcccccacttcctggactaattgtaaaccaccttctaccacctgggggtgcctgagcacaacagagctaagtgaacatttcatcagtctaattgaattcagtggaatgttgggggcctggaaatttggactaggaaggtaagcaggaggaataagtgtgaatgacagtatctaaattaaaatctgttgccacgaaagaagatcagaccttttctcctctgatttgtccttctagaagtcacaagatgcccaaagaatcataagcaatgggtaactaggcaagggaattatctctgacaaatgccatgattgctcagtgtcccatttctcttggcagcaagagtggcccaaagactaaactgagatgggggtctgcacccctgcatgggactcaggctctgcagctagccttccaaccactaaacctgagctgaggtacttttagctctttatttcttgtttttctcatttgtcactcagatgagaagaatgcccgctctgtttgactcagtgtcagcgtgatgaagtaaaacagcttctttaaatccctctgcaacaaggcagtgaattgaaaataagaaagatagggaagaacattctgggcaagacagctcaatgagttcatgctttgatcgatctctcagctctgaacacaaagccatgacaggtaggtataaaaatagaaagctaaaaagagatgtctggctcaacagaagcagaagagacactgccagaagcctctgacctactgggctctttgtctaaaatcagcagggagtttggcctctgctgggcaaatccaagacgccccacccaagatggcagacaggaaccaagtacttgcttaaagtcaggaactagggtggggccccgaaagaaagacagtgcctcactgctgcctagggaccaaggttttagaaaaataaggttgaggggccaagatggccgattagctgctgctgcagtccgcggctctcatggagaggaatgaaaacagccagtgaattcagcaccttcaactaaaatatccagattctcggccccactcggactagtcagacaactagacctatggagaatgaagaaaagcaggctgggaaaatggtccacccgagagcggcacggagccaaaggaagccccaccccagcaaagggaagaggtgagtgagtgtgcgacaccacccggaaaaccatgcttctcccatggatcttcgcaacccgcagatcgggagatcccttcatgagcccatgccaccggggccttgggtccgacacacagagctgtgcagagtcgtggcagagcggccactcaggcacacacaaagacccaggaattttacatactccagcccaaggaatcccagcaaggcaggagatccattcatctattcccccaggaagggggctgaacccagggagccaaccagcattgctttgcaggccccgtttacacagcacctcacaggttaaggcccactgtaatttttgccagccagtggtgacagcctggagtcagcctgagatggactgagctctcgtgggtagaggcagccaccatctctgcggttcagttgactcagccattctagcctgccagctccggggagtccagacagtctggacaaggaggagtctcccacaacgtgtagcacaggtgctgtgccagatcgtggccagactgcttctttaagtgggaccccgatccaatcctcctcactgggtggggcctccctgtgggaatttcagcagctccagccagggttatatggaaaatactctgctctctcctgggacggagacccccatgagaaggggtggccgacgtcgctgcagttcagtggactcagtctttccagcctgctggctctggagagttcaggcggtctggaggaagggtcccctcaatgcagcacacccgctacacctgctctaacaaaaagcagccagactgcttctttaagtgggcccctgatcccgttcctcctgactgggtgagacctcccaacaggggtctccagagacctcccacaggagcgatcaggcaggcaacatgtcagtacattcctgggatggagaaaaatgagcaggctgccatcttgctgttttgcagacttcactggtgatacctccgggtatgggaaaaaccaaggcaactagggtctggagcagaccctgagcaaaccacagcagccctgcggaagagtgacctgactgataaaagaaaaacaaacaaacaaacagaaagcaccaccgacaacatcaaccaggaaaaccccattcaaaggtgagcaacctcgaaaatcaaaggttgataagcccacacagatcagaatcaatacaaaaacgctgaaaactcaaaaagccagagtgcctcttctcctccaaatgactgcaacacctttccagcaagggcatggaactaggctgaggctgagatggctgaaatgacagaagtaggcttcagaaggtggctaataatgaacgtcactgagctaaaggagcattttgtaacattaaaaagtggggaaacgacatgaacagacacttctcaaaagaagacattcatgcagccaacaaacaaatgaaaaaaagctcaacatcaccgatcattagagaaatgcaaatgaaaaccaccatcagctaccatctcactcccatcagaatggctattattaaaaagtcaagaaacaacagatgctggtgagattgcagataaaaatgaatgcttttaccctattggtgggaatataaattagttcaaccattatggaggacagtgtggcgatttctcaaagatctagaggcagaaataccatttggcccagcaatccctttactgggtatatatatcattctattatatatacataaaataggaatacaaaacatgctattcctattatatgtgtaataggaatacaaatcattgtattctaaagacatgcatatgttcattgcagcatgattcataatagtaaagacatggaatcaacctaaatgctagactggataaagaaaatgtggtacatatacaccatggaatactatgcagccataaaaaggaaagagattatgtcctttgcagggacaccgatggagctggaagccgttatcctcagcaaactaatgcaggaacagaaaaccaaacactgcatgatctcatttataagtgggagctgaatgacaagaacacatggccacgtgaggggaataacacacactggggcctgtcagggaagggggagagagagcatcaggaagaatagctaatggatgctgggcttaatacctacgtgatgggttgatctgtgcattttgtaaccaaatgtacctgtaatttatgatccaattcaagttgaattttttataaaagataaaggaaagattaggattatgtttttacatagaaatgcacaattgtttcagtacaaactaaagagattttcagaatttcatagatgaaaacaattcacatttgctaaaatgtatcctattaatactaacggttgtacttcagccataagaaaagaggacagaagggaatgtgtgaaagtcagtattaaatggtagtcaattaaaaataaaataaaaattttgaaaggtaaaataataattactgaaactgataaacaatattaataattttaatagccattaaattaacaaaataataataattagatttggaattttttaaagaataagatgagttaaatgggtgaaagtccacagaaagaaagttttctgggtccttgatgtgatcgggaagaaaacagaaatatttaacaacagaaattttgtaggaaattcatagtttactaagtatgctaaaattttatagataattacaaaaaggatataagtaatctataagttgcaaagcaacaaaatatattcttttgtgtaaataaaagggaaaatagaatggtttctcacaccaatgagaaataggagggaaaaatactttaagagaaaaagttgtgaaataaaaatcaaaatgtaacatggtaaaaatatatgcaggtacatcaataatcataatatctttaaatagaataagcacacaaaagactacaatgattacattgaataacaaaataaaatctaattatatgctgcttacaagatatacatttgaagtaaaaccaaattgaaaagttgaaaattaagtaataaaaaaatactaagcaaaggctaacacacagaaatctaaggtagcaatattaacacaagacaaagtaaaaattcaggtgattaatagtatacaaagatcacccaatttaataaaaggaaacagtctgctaggaaaatattacaattatgggtatgtagttaactatacagactcagcaaatataaagcaatcctggcagatttataagacattgatatatctatctatcttatcaattcccttaaggggaactgagttgtagggagccatttaacacacttctctcagcaactggtagatctgccctccccaacatagtaagcatatagaatatttgagtgatgaaattaacaaagttcattaaatatatatatagagagagcactacacccaaccaataaacaatatgcatttttttaacaagtgttcacggaactttttttaccatttggccatgtactagatcatgaaagaagtctcaagaacattttaaatattagttttacatacgtgcttggctctatgatcaaaatgcagttaggttataaatcagcagtaaatttatggtcaataaatcttcacatatctgaaaaccaaaaaccaagtacatgtctacttaacccattggttagagaagaaaacattttagaaacaataaaatactaaatgccatagaaaatactatatatgaaagtttctgggatgcagctaatgtggttcttagaggtaaattgacagcattaaatgaatttttgaaaagaaaaatgatagaaaataagtttaactaaaaaaaggagacatatgaaataaactaaagaaagtagattaaacaaaattttaaaaacaaaaattagcaaaaatgaaaatgaaaaaggagagaagagctactagatgaaaagctactcaaggaacacaatttgaagatttaaataagatatatatttttctagaaaaaaaacatgaacttccaaagtcaatttatgaatagagcttcatcataaaactggaatctataaaaagtatcagttcaatagatggatttactaacatattagacacagctgaagaaattatttatgaattagaatgtaagtcagttaaaaatattcagggtgaaacacaagagaaaaataatgaaaaatacaaaaaaagagtataagagatgtaaggaaaaggattaagagaagtgcagttagaggctgagaagtacagaagaaagtgaacagagcagaagtgatatttgaagagatagggactgagaattttccaaaaactgattttaaaaatgaagccatgggtgaaagaagtatttaaaacttcaagaaaaattactttaaggaaaatcagaatttcttagtgcatcatattaaaatgctgaaaacaaaaaataaagagaaaatcttacaatcagacagaggggaaaaagatatacaggaatcaccaataagatagatactgtatctcatttctcaaaaggaagattgaatactatagaaaattaaatggcatctttaaagtgctgaaagaaaataactacccacctagaattctatacctaatgaaaatgtcctttaaaaatgaaggcaaaataaaggctctaataattcaaggagcgttctgtaatctctaatgttttaactaaaataatgaaagaatgtataaataataatggggaaatatgaaacaaagaaaaatacttcattaatctaaaaagcataagaaataataagtccatagacaagtgtaacaaacagaaacattacagagttggtaaaacttgaggagaaatagatgaatccactattcaacactactttaacagaaacagacagatacagcatgctaaaaatcagtgcgaacatagttgaattcagcagcaccatcaatcaactggatctgattcatctaaaacgtcatccaacaacagcagaatacacattcttctcaagctcatatggaacactcaccaagatagaccacattctgcgtcataaaatacacttggcaaatttagaagaatcaaaatcatcctatgtctgccctcagaccacaatggaatgaaaactagaaatcaatgacagaaagataacaggaaaaatccccaactacttggaggttgaacaatatacctaataacacatgagtcaaagaagaaatctcaaggtaaactttaaaatattttgaactaaatgaaaataaaaatacgtgttgtcaaaatttgtgagatgcagcaaaagcagtgtttagaggaaaagttgtagcattaaatgcatatgttagaaatgaggaaagatctaaaattaacaatcagctttcagcatggaaaactgaagaagaacaacttaagcctaaagcaaatagaaaaaaaaagaaataagaaaaattaattaaaaataggaaataagtgaagaaaatcgacaaagacaaaagctggttctttgaaaacatcaataaaattgacaaacttctagtcaggctaagaacaaaaaacgggagacacaaattaccaacattagatatgaaagagagtcatcactactgatcacatgaacaacaaaatgatcatttaaaaatactgaaaacaacattatgctcacaattttgaagaactttgatgaaatggaccaattctttgaaagacccaaactaccaaaactcacacaaggaaaaatagatctgaataggcccatatttattagataaattgaatcaataattaatagacttccaaaaagaaagcaccaagctaacctggtttccctggtaaattctatctaacacttttaaaataagtgatattaattctctgtagtctctttcagaaaatagaagcagaggaaacacttcctaattcattatatgaggctaacattatcctaataccaagagcagacattacaataaagggaaactacagactaatatctctcatgaatgtggatgcaaaaattcacaacaaaatattaacaaatcaaatacaataatgtacaaaaagaattatacatcacaaatgagtgagatttatttcaggtatggaaggctggtttaacatttgagagtcagttaatggaacccaccacaccaacaggctgaagaaaaaaatcatatgattatatcaattgatgaagaaaaagcatgacaaaatccaaacccattcatgatgaaaactctcagcaaactaggaattcaacttcataaagcacatctacaaaaacctacagctaacatcatccttgatggtgagaaactgaatgttttctccttaagatcaggaattagaccaagatgtccctctcacaactcctattcaacattatactggaagttctagcttgtgttaaaaaacaagaaaaggaaataaaagacatacaagttgggaaggaaaaaataaaactgtctttttcacaaatgacatgattgtctatttagaaaatcccaagaattaactaaaatttcttggaactaataagtgattttattagtttactaagactgccaataacaaaatacaacagactgggtgagttaaatgacttaaatttattttctcatagttttggaggctagaagttcaaggtcagggtgtcagcaggtttgatttctcctgaggcctctctcctcctcttgcagatggccacatttttgctgtgtcctcacatggccttttctctgtgtatgaaaatccctggtgtctctttctgtttgtctcatcttcttagagggacaccagtcagattgaattagggtccaccctagaggccttattttaacttaatcactttttaaagtccacatctccaaatgcagtcacattctagggtactggggattagggtttcaacatatgaaatttgtggagggacaaattcagtccataatagtgattatattatagcaaggttgcagaatacaaggttgatacaggaaagccaatggctttcttatatactatcaatgaacaattaaaaatacaaatttaaaagcacaatatcatttacaatagtaccaaagaaagaaggaaagacattaattctcaggtagaaatctacaaaaacatatacaggatctatatgcagaaaactataaaactctgatgaaagaaatcaaatcaaatgaaaacaaatggagagatatttcatgtccttggattggaagactcaatgttatttaaaagacaattcactgtaacttgatctatagattcaacataatctccccaaattccagcaagctactttgtgcatatcaacaaactgattctgaagtttatataaaaaagcaaaagacataaaatagccaatacagtattgaagaacagagttgaaggctgacactactgacttcaagacttaatataaagctccagcaaggaagacaccacagtactggtgaaagaatagacacttaggtcagtggaacagaatagacaggccagaagaggactctcacaaatatactatagtcaattctctttgataaagaaccaaagacaattcaatggagtaagggcagtgttttcaacaaatggtgcataacaattggacagccacgtataagaaaacaaatctagactcagatcttacacctttcacaaaaactaactgaaatagatcatggatctcaatgtaaaatacaatattttcagatttccagaaaaaaaaaagcagaaaatcaatgtaaccttgaatttagtgatgagttttaaaatacaagccaaaaagcatgattcatgaaaaaaatttataaattatacttgattaaaattaaaatactatgttctgtgaaaaatactgttaagggaatcaaaagacaaggcacagattgggagaaaatatttgcaaaccacctatgtgatacgggaacttgtatccaaaatacacaagaaactcttaaaaaaacaagaaagcaagtaatgcaattttaaagtgggctaaagatctgaagagacagatcaccaaggaagattcatagaatggcagatagaaagatgcccatcataatttacggctgggcacagcagcaccagctcctcagaaggctgaggcaggagggccccttgaaaccaggagtttgaagctattgtaggctatgatgtgcctgtgaacggccactgcactccagactgggcaacatagtgagagctcatctttaaaataaataaacaaatgaataaataattaatttgtcattagagagttccaagttaaaacaatagcaagatgccactacacacctatgagaatggttaaaatccaaaagcctgacaataccaaatgatgacagagaggcagagcaacaggaactcttgctcatcgctggtgggaatgcagaatggtgcagccactttgaaagacagtttggctgcctcttacagaactaaatatagtcttagtacagaatccatctgctgtgctcctagatacttatccaattgatttgaaaacttatgttcgcataaaaaaatctgcatgtaaatgtttaaagcagatttattcataattgccaaaaactggaagcaactaagattctgttcaacagctgaatgaataaacaagttgtggtacatctatatagtggaatacggaatataattctgcaataaaaagaaatgagtattgagctatgaaaagttgtggaggaatcttaaatgcatactgctaagtgaaagaagccagtatgtttatagcagcatgatttatattcctttgggtatatacccagtaaactatgcaaccataaaaatgatgagttcatgtcctttgtagggtcatggatgaagctggaaaccatcattctcggcaaactatcgcaaggacagaaaaacaaacactgcatgttctcactcataggtgggaattgaacaatgagaacacttggacacaggaaggggaacatcacacaccggggcctgttgtggggtggagggggggagggatagcattaggagatatacctaatgtaaatgacgagttaatgggtgcagcacaccaacatggcacatgtatacatatgtaacaaacctgcacgttgtgcacatgtaccctagaacttaaagtgtaataaaatacatatatatatataaagaagccagtatgcaaaggctacatattatatgattccaattacataatagtctggaaaatgcaaaactgtagagactcgaaagtgatcagtgagttccagggttaaggtggagggtagagggtgaataggtgaactgcaggtaatttttagggcagtaagattattgtaatgtaaaattttagggcagtagaattatttaaatggtggatataagatattgcgttgcattgcctatgcaaccaaaggtgaaccttaatgaatgcaaattttgaaaaattatttaagaggttgggggatcccaagagagaatgcagaccatgagaagagaatctaactgtattacaaatataggaaacactctcactgaagggatgggtcggggaggggaagagaagaatactgaagtattttggaaataagtgaggcttataagattaaaggcaaagggaactgcatgtgagcactgtactctagttgaaaaaattgtttcccatagaggtactggttaacaattctgttattgctatgtatttatactggaatggaacaattacatgaatggatggcagatggtagaagccaggtttctcaccactggagtggctgtttatcaaaaagcaggaggagaaagaatcattcatgcagtgatggatttgagttggagagagcagtgtggactcatatttagctcaatagagaggctgatggttatctatagaagtatttatagatatgcatatatacatgatatagtataaacatgtgtgtttcttgctctgtccctgaaacagcctgaaagaaatgacatcccagtaacagcaaacgtgcacagcaccgtatcttggtttctaatactattctccatttaaacgaaccaggattctttggagaagtggctgtttctaagactgggacaggaaatatccaagatgagcctaaagcatctggtagtgccagaaagtaaggaggtgctcaagaacaaaacaggaccaaacaaaacattgatcagggtctgtcaaaggagcacagatgccagctaaaagagttcccaatggccaaagctggaacactttgcggtaataaagtagtattggattataacctacagtataaagtaaatatgcatggtataaatacatggttaaatatattaataaatgaggaagcagagacaaatctctcttacaaaagaattccatatattttacacaggtactctgtcttcaagaagaaggaatcaaactccccattccttcagtgtgagctgtacataatgacttcctcccaaagtgtacaatatagaaaaggggagaaaaagagtaaatttacagtggaggaccctgacaagcgccactcaggcaggcgaccaaggctaccttccgcactcataaatcatgctgacagtaggtacgcttgatatcacgggatgaaaatagcacttcacctctgtgattttctttccaataacttacaaccccagttttctaatgagaaaaatatcaggcaaattccaaaagtgggacattctacaaaatacctaagcagtcctcagaaccctcaatgcatctaaagaaggaaagtcggagaaactgccacagacagcaggtgcctaaagagacatgacaactaaatctaatgtgggattctggaacagaaggaaaagacattaagtaaagactgaaagaacaaaattatgaacttttgttaataacaggtcattatttgtttcattgtaacaaatgtaagatatcgataataggggaaactggatgtgaagtatattgaaagaattgaacaatgaaaacacttggacacaggaaggggaacatcacataaccagggcctgttgttggcgggggggatggggggagggatagcattaggggatacacctaatgtaaatgaagagttaatggatgcagcacaccaacatggcacatgtatacatatataacaaacctgcacattgtgcacatgtaccctagaacttaaagtataataataataaaaaagaaactctctgtgccatcttctcaacgtttctaaaaatctgaaactgctgtagaaaataaaatctattttaaaaaatttaaataagcaaactgctcactactacacaaaaaaagcaaagattagtctcttgagtataaaattgagcagaagaagccagacacagcctgcaagctccaactccattcataaagagtttgcaaactggcagcgatggcgcgagagcttaggaaattgtttcactgggggaagtggaacagacgttgactggatgatgtcacatgaggggcttctggggtactattaacattcgatctcaaatccaattggtggttatatttttgtttccttaaattaataagtattaatttatgaaaattaattgaaatgacactcataatctgtgcacttttctgtacaattcaataaacttaatgataaaaacaagaatgaatcagaactgtgtatatcaacatggatcaatctaaaaagcaatgttgattaaaaaaatttaaaaatatgtccgggtgcagtggctcatgcctgtcatcccatcactttgggaggccgaggtgggcggatcacctgaggtcaagagtttgagaccagcctgaccaacacggtgaaaccccatctctactaaaaattacaaaaattatcatgcctgtaatcccagcactttgggaggccgaggtgggcggatcacctgaggtcaggagtttgagaccagcctgaccaacatggtgaaaccccgtctctattaaaaaatacaaaaattatcatgcctgtaatcctggcactttgggaggccgaggcgggcagagcacgaggtcaggagtttgagaccagcctggccaacatggtgaaaccctgtccctactaaaaatacaaaaattagccaggcgtggtggcatgggcctgtaatcccagctactcaggaggctgaggcaggtgaattgcttgaacccaagaggcagaggttgcagtgagccaagatctcaccattgcacttcagctctgggcaacagagtaagactctgtctcaaaaaaaaaatacaaaaattagccaggcatggtggcgggcgcctgtaatcccagctactcaggaggctgaggcaggagaatcgcttgaacccgggaggcacagattgcagtgagccaagatcgtgccattgcacttcagcctgggtgacagagcaagactccatctcaaaataaataaatgaacaaataaataaacaaagcaatgttgaatgttaaaaaagtaatttgtcaaataataactaaaatagactactttttttatacgtaccttctgtaaaacaaactatgttcttatttatgggcttacaaaatttagcctaagtatcaaaacacacttgagattataaataccaaattcatgatagcagttatctctgcaaagagaggaaagaaaatgaaattgaggagggggactcacttttttttttttttttgagacagagtctcactctattgcccaggctggagtgcggtcgcatgattgcgactcactgcaagctctgcctcccagattcaagtgattctcctgcctcagcctcccgagtagctgagactacaggcgcacaccaccacacctgtattttttgtagagatggagttttgccttgttagccaagctggtctcgaactcctgacctcaggtgatccacctgctttggtctcccaaagtgctgggattataggcatgagccaccatgcctgaccaacttctacctatactgttgcatgtatatatatttaaaaatccaaaaaacatattgcaaaatgttaagttgtgatacagttgggttcagctacaagggtaaccatgacatttctctataactgcttctagttttgaaatacatatatatgtatacacacacacgagtgtgtgctctataagaacatgtaactaatattgtatagtgcaataacagcctaggagaattaacaagcattttgccatcaatacttatcctttgtgttgctgaggatgaatgaacccatagatcattagtctttgaagccgttggcttcttttaaaagtggttctaactcgaagactaatgacctttgcatttcaccagccccaccttgttaatctcatatctttcaagacatgtacactttgggaggccgaggcgggtggatcatgaggtcaggagatcgagaccatcctggctaacaaggtgaaaccccgtctctactaaaaatacaaaaaattagctgggcgcggtggcgggtgcctgtagtcccagctacttgggaggctgaggcaggagaatggcgtgaacccgggaagcggagcttgcagtgagccgagattacgccactgcagtccgcagtccggcctgggtgacagagagagactccgtctcaaaaaaaaaaaaaaaaaaaaaaagacatgtaatcccaaagtttccttgaagataaattacatttgctgacaggactctttagaaccactgagaacagtcagatattggaggtcaatgaggaaacaaccccactgctgattcactccatagcatgcactgagcacccacatggtccacatgagatgtgatggggcttgaaccagtctggctgtagaggggaaagaaggagagaaacagatctgagaagcattttgaggcagagctgtcagaagtcaccaaatggctctgaataacatggcggagtccaagaggccagaagaagaatcaagaacagccagggccggtttgagcagctgtgtgaaggctggcaccattaactagggtagaaagcatggtggagaaatggggctggctaagcaaagttgcgggttcaatcaagaagtttgcctttggaatgtgtcatggttgagatgcctttcacaatccaagtctaggcctggtgaggtggctcatgcctgtaattccagcacttcgggaggctgagatgagaggatcgcatcagtccaagaatttgagaccagcctgggcatcatagtgggacctcatctctacaaaaaaacatttaaaaattagctggctgtaatggtaaatgcctgtagtcccagctacttgggaggttgaggtgggaggatggcttgagcctgggaggttgaggctgtagcaagctatgattatgccactgcactccagccatggtgacagagcaagacctcatttcaaaaaaaaaaaaaaaaatccaagtctagatgtgaccaggtatgtggaatctggagctcaaagaggagtcagactggaaagatatacacttggatgtcaccagcatattgatgttgcttcatgccatgggacccaatggggcccccccaccctggaggagggtagttagagaagagaggtctgaggatcaagtcctgggatggttagagtttcatagaggagcaggaacataaataataaaggccaaccacataaggaaaacaaaagctatatattcagggtatactgtaacaagggagtcgtcaccatcacttacattttggtagagactccaaggcaagagtgggaaagtttgacagtgatgttaaccaaaaactgacagaggcaggtgtctcaattgatagcggtttatttcgccaaggctgagaatgtgcctgggaaaaactcgagtcacaggaacatctatgacctgtgctttccaaagagggttttgggaattcagtgtcgaaaaggcaaagaacagacaggagggaaaaaagcgagggagggtgggcagtgaggcaaatggtaacattattgtgaggttctgattaacgctcagtaaattggcattttacataaaataaagcaaacacgtgaaaagaggaagtatggggaaaagtcaatgatgcatttatctcagggtggatgaagggatgatttctggtcttgtccttgtcctcttacctgtgaagataaacttgtaattgacattgttagggtgagattgaacagaactcagtttcggggctagcttataggggggatatgtatcctataagatttagggctcacacagaatttccttgtgagcaatttgtgaagaaggccatctggggagatatgtggcctcctatctttgtgggaacctggcttatgtatgacgttatgacacagggttttgaaattacagctatttgagaacaaaagaaaggcagtattgcatgactcagttcccaagcttaactttccctttggcatagtgagtttagggtcctgcgattttgttttctttcacagtggaaaggaagggaaggctgcaggtgcaccctgatgggagtctgttggcatggcgaagccctaggtgagctaattaggggcagggtgtcccatggaattggctagggatgcatatttggttttctctggttggtcctaaaattaaagtgaagacaaaaattaggggagctgtcagttattaatcaagtcctggtcattgtgggccaactgttatggatattattatttaacttcctgaattgttactagagatagcagtccggctttctatgagtctgacttatagcaggctggcttccggttgtttattgtagataaaggggttgggttcctggcaggtagctgcaagctgtgagtcatagttctatttatatatcatgtggccattgtccatttgtatatttagtctcttgggagaaaaaagccgaaaaggagattgaaaggagcagctagagagaggagggaaactaagacaatatcatcatcccagaacttaggaagataaagtcccaacaagaaaggggtggttcactgaagcaaatgctgctaaaatgtctgataagatgaggatgtcaaagtaggtgaagcttttccaggtgaaaaagagacgtagccatcattgttgctgaattctcagacacaggaaacattttcctgtggcttcaggcaatggtgaaataggaactaacagggtcagctaggaagagaaacttttaatgcctctagggggcacagcatatcatacctaacaactgagcagcaaataccgtcccctactctccagacgcattttccagcccaacatgggattcttagattggttagatggcagcatctgagaccacaattaacctgaaatccaagctcaggcacttgcagctccaaagcctcacactcgatgctccgagtttagggacttctatcaagtaaattgggaaatgggtcgttctcctttgaagactgttaggaaagagggacaaaaacggaaaaaaaaaaaaatcaatccctgagtttaatctccagtattccttcccagaaactttaagttagctacaagaatgttaatcatgagcagaaattgtttaataatcaaattatcataaatttgcttttcttttaccttagtaaggtaactatgtgacaaacatttgtgaagttgagaatagataaaagtacccatcatatgatctagccatcccactgttggacatatacccaaaagaaaggaaatcaatatcttgaggagatatctgcacttccatgttttttgcagcactgtttacgatagttaagatttggaagcaacctaagtgtccatcaacagatgaatggataaagaaaatgtgatacatccacacaatgcagtactattcaccccttaaaaagactgagatcctgtcatttacaacaacatggatggacatggaagacatcatgttaagtgaaataagccaggcacagaaagacaaacattgcatgttctcacttatttgtgagatctaaaaatcaaaataattgaacacatggatatagagagtagaaggatagttatcagaggctgggaaagctattcgggggctggtgggtgggtggggagagatggggatggttaatgcatgcaaaaaataactagaaagaatgaagaagacctactgtttgagaacacaacagggtgcctatagtcaataagaagttaattgtacacttaaaataactaaaagagtatacttggattgtttgcgacacaaaggataaatgcttgagggggtgaatacccctttcttatgatgtgcttatttcacattgcatgcttgcatcaaaacatctcaggttctccataaatatatacacctattatgtacaaaaattaaaattatttttaaaaagtgccaagaaactctgtaccctaacatagccctgttagaattacttagcactaatagttgcctttgctgagtgatgcaagcagatgtctctggccctcaaagatgaggagacactgctgctctgcttggtgtgaacataaactccagttcttctgggaactgccttaaagacagcagaaactggagagcagagaaaagtggaaagtggccaggcacggtggctcacacctgtaatcccagtactttggtaggccgaggcaggcagatcatgaggtcaggagttcgagaccagcctgaccaacatggtgaaaccccgtctctactaaaaatacaaacattagccagatgtggtggtaggtgcctctaatcccagctacttgagaggctgaggcaggagaattgcttgaacctggaaggctgaggtcagtgagccgagatcttgccactgcactccagcttgggcaacaagagcaaaactccttttcaaaaaaaaaaaaaagtggaaagcataaccttgcttgatggtgaggttgaatccccaccttcgcctttctcagatttattcccatcttcctactcctccaacccctatgttggctcaagcccagatggctctcacctgcattaacctaaccatctcgtaacccatctcctctctttgttcctttcctatgcaccctccacatggccagctgccagaggatctttcaaaatgactaatcttactattcttctcctctacaaagcttcagaggcttccagtctggactccttaacaacacataaaaaattcctcttctgttcttcctctggctggtggctctcaaccttggctgcacttgaggatcctggggagctttaaaaactgccctgctctggtttagtcagtctgggctgggtcccaggtgtctagagttttagttttgtttcccaggacctggtgactccttgaactatttgcagattcctgaacccctgtcggagagtaagctgtgttctaatctcatcagatctaaggagagatgtaggaacttgccttgaggcttgaattctttctcctactctccacttgtggtagtcagtcttttgcatttaagggtcaaaaataagaaggcctattgtgtttccaaggctggggtccatagtgcatacgataggtttcagagggagagatggcagtggagatggggaaagaaaatgtggaaacctgagtctaggatgttgcttgctaagtgtactagaatatgccaccccaaatatgcctctttggcatataattattttgagctgaaggctattgagaaccagcagatgcacgaaaggtctaaaaacagagtctaagttttccttttgtaaaggattgtagaggtgtctccttctcccaggaagaagactcttaactactcatcagaggagaaagggcagacttaattctgcacaacaaatcttactaaacacctcttgtttaccatccttttcctggttaacttctcataagttgcctcccctacacagaagccccaaccccttcttttttgttttagcctaagatggtatttaacccccagtctaaccacccctttgggttactcacctcttagtgttcctgtgtgtacacagacaacgaacttgtaagtagacttgtttttctcttgttaatcagtctttggccagtctaacttataaggtttcagttggaaaacctaagatgggtagaggaaaagattcccctgcaacacacttatattatgaaaccaaactggataccaagcaaggaggatcgggcatctaacacttaactcctgacctccacaatagcttgcaggtaagggtttttttttttttaatatatatatgtatttttatttaagttctagggtacatgtgcacaatgggcaggtttgttacatatgtatacatgtgccatgttggtgtgctgcacccattaactcgtcattttttttgttttgctttttgttttgttctgttttttttgagacggagtctcgctctgtcgccaaggctggagggcagtggcacaatcttggctcactttaagctccacctcctgggttcaagtgattcttctgcctcagcctcctgaatagctgggacttcaggtgcctgccaccacacccggctaatttttgtatttttagtagagacggggtttaaccatgttggccaggatggtctcaaactcctgacctcaggcaatccacccgcctcggcctcccaaagtgctgtgattataggcataagccactgtgcccggccacaggtaagggttttaaaggcaggaggcagaggttacaggcaaaataagaaatcatggaggttatacattggtttaacctagaaaggtggaacatcttgaagtgggcccacaggtcataggtgaggcaaagctttgtctaaaactgtgggatcagtagaaaagaatgtcagctctggctcatgggtgtgacttcctccaggctccccagggagaaatttagaacaaagaatggcagtcagaattcagtcctcaattcctctttatctgaagtctatgtgtcagtggatccatttggtggatccattggtgggggtccaggtttctgaaacaactctgggacatatgttaatggcacaggacttttttggggtgccacttcaccagccagagacctctgcagctggctgcacccctgcctgggcctcactcagctctgagctggcctctggccttgctccatccagttggcccagcaggctgcacccagctcaccctaccagccaccacaggtgagccaggtgtggagtggcaagtttgcagggtccagttactgtgcacagtcaggtgcatcagctgctgcaatggaatgagcagctccaggtgctggcatccagactaggggaacacagtggcacccaaaaacttggagatgccagcacctgtgaagccccaaagggggtgttacatcatgtcacagcactggctccagaagctctgaggtctagatgtccagaagggttgcagctcttttctccttcccgccactcacagtgcagaaaatgggggtatgttaacagctcattcagtcctgctgccctgctctagcttgtggctcctgggaaggcccggccctgctgccatttcccatcacgtgggacggatgcccagcactggcggagggtgggagggctacagtgttacagcagctacttttgcacccactgtttggtgggtcctgggttcttgtcccatgtccatgaagaatgagattatgctgacaactggagagtgagcaaggcagagaagagctttattgagcaacaaaacagctctcagcagagaggggagctgaaggtaggtagtctcaatgtgtggctgagtctctccagtttttatgggctcagaatgtgggaggtgtcagctatccatagccttggaaaaggcaacacttgattggttaaaaagcattattcagaaagaaccaattgggaaagagcaggcaaatgaaaatagaagttctcattctggtcatggactccatccagaactgacagcctggttttcaggcttcaggctgtctttggcttggaggttgggtttcatgggggacccaccccaatctgcctgggaatttgtctgtctcctgctgctatctttaagatgctatctttggctgggcatggtggcttacgactgtaatctcaatactttgggagactgtggtaggcagattgctcgagcctagtagtttgaccagtgtgggcaacatgacgaaaccctgcctctacaaaaaaaaaaaaaaatacaaaaattaacaagttgtggtggcatgtgcctgtggtcccagctactgacagagctgagatgggaggattgcttgagccctcagatcaaggatgcagtgagtcatgattgcaccactgcactccagcctgggcaacagagtgagaccctgtctcaaaacaaaacaaaatcaaacaaacaaaaaaagatgttatctttagtttttacagggagccaaacatcccatgattctcacttccatgattattgttttaagctactattactctcttgcttatcaagttgttcatttacttctcaggctagctaggtgcctggaatttccctttaagaaactcaagattttttaattcctctgtttggtgctggggagaccaggcccctaagaggggtccctgctccatctcatttgtaagagcttatgagacagccgctccagggctggccagtagctcaggaggaggaagagtcagtggcagggaaagggaggtccagctcgcctgggagataggagctcttccagcactgggctgggaaaccattctctggcagccctgccactcagtggaccctcaacttctccttaatttcctaggcagtataagggtaagtacaagtaaaaagaaattgaattttccctggtgccaaaaggcaaagagaagtccctccctcccttttcttagagtatttcctttataatcctttctctgtctctttgggaggtatataaacctttctgaaagctaaacaagccctttgccactttggcttcccaggaatgtgcttctcgggggcctcggagccatctctttgaaatgtgaacattaagatggatggtgccctgtctcctgtctctctgggagctttgcctaggagtctggctacaagttgtagcatatgagagttttcttcttcctttggatgagtgcaattaacacatatgtaatagattctatctgcctggctatgtaagagggtgatacattttttctgtctttgcaatttctttagtggattgcttttgatgtgtgttgcaatctggtttaatgcatatgtaataataacactttttttcatttcgtatatttttggacaggttttctagattggcagattttattttaaatttccgcaacagcagcaagtcctagcatacctcaacatcatcccaggaacaccccacccttggggaggaaatatgccagagataggaagggccacttctaaatacaagagagtcatcaggcacctgtcaggagggagagtatccagtctctagagatggaaatgtcaacctaaaaggaagaagcaaaggcagaattaatatagagagtttatttgggccaaggttgagagctgcagccatggatgcacttccaagttgccttggggagtgctctggaggacaaagaagagcctcaagtttttaaagaaaaaaggaagaatcatgagagaagcaattacgaaagctgctcatcaggaattttcattagtttacagaaataacattggttagtgattggctatacattgttgcaacttggcattcatctgcagcccacatagcaagtggcttcaagaggtcattattcagttccagggagagtgagacctgattgtggtcacattttaaatgcctttctgggcctgatgatttaaagggctcacattcctcagataaaggttttttttctttctcagattgaagtattctggtgcactcagcctttggacagaaaggagtggagattctcattacatatgggtgcttgccttagttgttttaaatttatgtgcaaccaggctgtttctcccatataaaagcacccctaaacggctgggcgcggtggctcactcctgtaatcccagcactttgggaggctgaggtgggtggatcacaaggtcaggagttcgagaccagcctggccaacatagtgtaaccccgtctctgctaaaaacacacacacacacacacacataaaaattagctgggagtggtggtgggtgcctgtaatcccagctactacggaggctgaggcaggcgaattgcttgaacctgtgaggtggaggttgcagggagccgagactgtgccactgcactccagccagggcaatagtccgagactccatcttaaaaaaaaaaaaaaaaaaaaaaaaaaggcacccctaacaagagccaacagtctctgttgagaccttcctacccttcaagagaacaccaaattggttgatgaacatagtggagaggaacggggatctccatcattgggaccaagagaggctgtgaaacatgataaacgctggtctagaacagtatggagaggcacatgtagtagcgggttcaactagcaaagagaagacagcgtcctttgcaattttatgtgagtccttccaatcagatgaccttacagaggttttaagtttaggttttgttttttttttgaatttgtgatgactttttggagtttggctcaactgtcttgtagaacatccctcattctagctttgtcagacagcttcgtcagggcctccttgacttgtccttctctcctctgtatttcctgtaactggatgtggatctaaaggctgaactgggctcatgagaagaatccttcacaggtgtgatggttaatactgagtgtcaacccgattggattgaaggatacaaagtattgatcctgggtttgtttgtgaggttgttgccaaaggagattaacgtctgagtcagaagggtgggaaaggcagacccactcttaatctgggtgggcaccattagctgctagtgcagctagaatataagcaggcagaaaatgtgaaaagagactgtcccagcctcccagcctacatctttgtctcgtgctggatgcttcctgccctcaaacatcggactacaagttcttcagtttggatctccctgctctcagagactggctctccttgctcctcagcctgcagatagcttattgtgggaccttgtgattatgtgagttaatacttaataaactcatatatatatattcattccattagttctgcccctctagagaaccctaactaatacaacagatggatcccatcaggacacatgatgacagcccatccctgctggcattgctcactttgataatttagggaaggtgacagtcaccgtatctttcatagtaaacgtgcattttccttctcaaaattagtaaatactgtaatttgttgaattatactttgacatcctgttcctcaacaacctttcacccaataaggtttggcatccactgaaggtgcttccctgaatctatttcttctttgagggttgcaataaatgtatatcttttttctacatttattggaggaagtcttccctaaagaagagttctcttttctctctctgttcctttttctttttttttgagtatcactgtgaattcatggatttctttataactcaatgtcaactgccatcattattatttctgatacttaatctcaatttggccggtgggaccctcttcaagctgcctctgctgttcgtttgacatgatcccattagtccgtgatttccttattttctggtacaataaggtgtcctaggctcaacttgtaatttacctgcttttgacttgtaatcagccggttcaatgaggatccctggttccctttcctggggaatggtacttagataccaagttcaaggcatgaggtgtgcccattgctattacaatgttatgacttctaggctctttgactgaaattaattacagacacacacatacatacgtgtacttatgaattcacactgacatttcttgtttttttttatttcaatagtttttggggaactggtcatgtttggttacttggataagttctttagtggtgatttctgatgttttggtgaacctgtcacccaagcagtgtacactgtacccaatgtgtagcctttttttccctcaaccccctcccacccttccccctgagtccccaaagtccattatatcattcttatgcctttgcgtcctcatagcttagctcccacttataagtgagaacatacaatgtttggttttctattcttgagttacttcactttgaataatggtctccaactccatccaggttactgttgctgtgaatgccattattttgttccttcttaaggctgagtggtattccatggtgtatatatgccacattttctttgtccactcattggttgatgggcatttaggctggttccatatttttgtaattgtgaattttgctgctataaacatgcatgtgtaagtgtcttttttgtataatgacttcttttcctctgagtaggtccccagtagtggaactgttggatcaaatggtagttctacttttagtttttaaaggaatttccgcactgttttccatagtggttgcagtagtttgcattcctaccagcagtgtaagtgttccttttcaccacatctatgccaacatctgttatttttttattttttaattatggccattcttgcaggagtaacgtggttctcattgtggtttcgatttgcatttccctgataattagcgatgtcaagctttttttatatgtttattggccatttgtatttcttcttttgagaattgtgtattcatttcctttgcccacttttttgagggtattattttttgttttgttttgttttgttgctgatttgagttccttgtagattctggatattagttctttgttggatgaatagtttatgaagattttctccccctctgtgggttgtctgtttactctgctgattgtttcttttgttgtgcagaagctatttagtttaattaggtcccatatatttatctttgtctttgttacatttgcttttgggttcttggtcatgaacactttgcctaagccaatgtctagaagagttttgccaatgttatcttctagaattgttatggtttcaggtcttagttttaagtctttgatccatcttgagttgatttttgtataaggagacagatgaggatccagtttcattcttttacatgtggcttgccaattatcccagcaccatttgttgaacagggtgtcctttccccactttatgtttttgtttgctttgtcgaagatccataggctgtaaatatttggctttatttctgggttctctattctgttctactggtctacatgactatttttatacaagtaccatgctgttttggtaactatacccttatagtatagtttgaagtcaggtaatatgatacctccagatttgttctttttgcttagtcttgtttcagctatgtgggctctttttttgttccatatgaattttaggatttttttttctagttctgtgaagaatgatgatggtattttgatgggaattgcattgaatttgtagattgcttttggcagtctggtcatttgcacaatattgattctacccatccatcaacatgagatgtgttttcatttgtttgtgttgtctaagatttctttcagcagtgttttgtagttttccttgtagagatctttcacctccttggttaggtatattcctaagtactttattattattattattgcagcttttgtaaaaggggttgagttcttgatttgattctcagcttggtcattgttggtatatagcagtgttactgatttgtgtacattgattttgtattccgaaactttactgaattcatttatcagatctagaagctttctggatgagtctttagggttttctaggtatacaatcatatcactggtgaacagcagtttgacttcctctttattgatttagatgccctttatttctttttcttgtcttactgctctgtctaggacttccagtactatgttgaatagaagtggtgaaagtaggcatccttgtcttgttccaattctcagggggaatgatttcaacttttccctattcagtataatgttggctgtgggtttgtcatagacggcttttattaccttaaggtgtgtcccttctatgccaattttgctgagggttttaatcataaaaagatgctggattttgtcaaatgcttttcctgcatctattgagatgatcacatgattttagtttttaattctgtttatgtgatgtatcacatttattgactcatgtatgttaaaccatccttgcatcccttgtatgaaacccacttgatcatggtgtttatctttatacatgatgatatatctttatatcttaatacactacttgatcatggtgtattatcttttttgatatgctgttggattcggttagctaatattttgttgaggatttttgcacctatgttcatcagggatattggtctgtagtttttctttttgttatgtcctttcctagttttggcattaggatgatactggtttcacagaatgatttaaggatgagtccctctttctctatcttttggaatagtttcagtaagattggtaccaattctttgaatagctgatagaatttagctgtgaatccatctggtcctggacttttttttttgttgggaatttttgtattattgtttttatcttgctacttgttattggtctgttcaaagtttctgtttattcctgatttaatataggagggttgtatatttccaggaatttatccattcttctacattttctagtttgtgtgtgtaaaggtattcatagtagccttgcatgatcttttgtatttctgtggtgtcagttgtaatagcttctgttttgtttctaattgagcttatttggatcnnnnnnnnnnnnnnnnnnnnnnnnnnnnnnnnnnnnnnnnnnnnnnnnnnnnnnnnnnnnnnnnnnnnnnnnnnnnnnnnnnnnnnnnnnnnnnnnnnnnnnnnnnnnnnnnnnnnnnnnnnnnnnnnnnnnnnnnnnnnnnnnnnnnnnnnnnnnnnnnnnnnnnnnnnnnnnnnnnnnnnnnnnnnnnnnnnnnnnnnnnnnnnnnnnnnnnnnnnnnnnnnnnnnnnnnnnnnnnnnnnnnnnnnnnnnnnnnnnnnnnnnnnnnnnnnnnnnnnnnnnnnnnnnnnnnnnnnnnnnnnnnnnnnnnnnnnnnnnnnnnnnnnnnnnnnnnnnnnnnnnnnnnnnnnnnnnnnnnnnnnnnnnnnnnnnnnnnnnnnnnnnnnnnnnnnnnnnnnnnnnnnnnnnnnnnnnnnnnnnnnnnnnnnnnnnnnnnnnnnnnnnnnnnnnnnnnnnnnnnnnnnnnnnnnnnnnnnnnnnnnnnnnnnnnnnnnnnnnnnnnnnnnnnnnnnnnnnnnnnnnnnnnnnnnnnnnnnnnnnnnnnnnnnnnnnnnnnnnnnnnnnnnnnnnnnnnnnnnnnnnnnnnnnnnnnnnnnnnnnnnnnnnnnnnnnnnnnnnnnnnnnnnnnnnnnnnnnnnnnnnnnnnnnnnnnnnnnnnnnnnnnnnnnnnnnnnnnnnnnnnnnnnnnnnnnnnnnnnnnnnnnnnnnnnnnnnnnnnnnnnnnnnnnnnnnnnnnnnnnnnnnnnnnnnnnnnnnnnnnnnnnnnnnnnnnnnnnnnnnnnnnnnnnnnnnnnnnnnnnnnnnnnnnnnnnnnnnnnnnnnnnnnnnnnnnnnnnnnnnnnnnnnnnnnnnnnnnnnnnnnnnnnnnnnnnnnnnnnnnnnnnnnnnnnnnnnnnnnnnnnnnnnnnnnnnnnnnnnnnnnnnnnnnnnnnnnnnnnnnnnnnnnnnnnnnnnnnnnnnnnnnnnnnnnnnnnnnnnnnnnnnnnnnnnnnnnnnnnnnnnnnnnnnnnnnnnnnnnnnnnnnnnnnnnnnnnnnnnnnnnnnnnnnnnnnnnnnnnnnnnnnnnnnnnnnnnnnnnnnnnnnnnnnnnnnnnnnnnnnnnnnnnnnnnnnnnnnnnnnnnnnnnnnnnnnnnnnnnnnnnnnnnnnnnnnnnnnnnnnnnnnnnnnnnnnnnnnnnnnnnnnnnnnnnnnnnnnnnnnnnnnnnnnnnnnnnnnnnnnnnnnnnnnnnnnnnnnnnnnnnnnnnnnnnnnnnnnnnnnnnnnnnnnnnnnnnnnnnnnnnnnnnnnnnnnnnnnnnnnnnnnnnnnnnnnnnnnnnnnnnnnnnnnnnnnnnnnnnnnnnnnnnnnnnnnnnnnnnnnnnnnnnnnnnnnnnnnnnnnnnnnnnnnnnnnnnnnnnnnnnnnnnnnnnnnnnnnnnnnnnnnnnnnnnnnnnnnnnnnnnnnnnnnnnnnnnnnnnnnnnnnnnnnnnnnnnnnnnnnnnnnnnnnnnnnnnnnnnnnnnnnnnnnnnnnnnnnnnnnnnnnnnnnnnnnnnnnnnnnnnnnnnnnnnnnnnnnnnnnnnnnnnnnnnnnnnnnnnnnnnnnnnnnnnnnnnnnnnnnnnnnnnnnnnnnnnnnnnnnnnnnnnnnnnnnnnnnnnnnnnnnnnnnnnnnnnnnnnnnnnnnnnnnnnnnnnnnnnnnnnnnnnnnnnnnnnnnnnnnnnnnnnnnnnnnnnnnnnnnnnnnnnnnnnnnnnnnnnnnnnnnnnnnnnnnnnnnnnnnnnnnnnnnnnnnnnnnnnnnnnnnnnnnnnnnnnnnnnnnnnnnnnnnnnnnnnnnnnnnnnnnnnnnnnnnnnnnnnnnnnnnnnnnnnnnnnnnnnnnnnnnnnnnnnnnnnnnnnnnnnnnnnnnnnnnnnnnnnnnnnnnnnnnnnnnnnnnnnnnnnnnnnnnnnnnnnnnnnnnnnnnnnnnnnnnnnnnnnnnnnnnnnnnnnnnnnnnnnnnnnnnnnnnnnnnnnnnnnnnnnnnnnnnnnnnnnnnnnnnnnnnnnnnnnnnnnnnnnnnnnnnnnnnnnnnnnnnnnnnnnnnnnnnnnnnnnnnnnnnnnnnnnnnnnnnnnnnnnnnnnnnnnnnnnnnnnnnnnnnnnnnnnnnnnnnnnnnnnnnnnnnnnnnnnnnnnnnnnnnnnnnnnnnnnnnnnnnnnnnnnnnnnnnnnnnnnnnnnnnnnnnnnnnnnnnnnnnnnnnnnnnnnnnnnnnnnnnnnnnnnnnnnnnnnnnnnnnnnnnnnnnnnnnnnnnnnnnnnnnnnnnnnnnnnnnnnnnnnnnnnnnnnnnnnnnnnnnnnnnnnnnnnnnnnnnnnnnnnnnnnnnnnnnnnnnnnnnnnnnnnnnnnnnnnnnnnnnnnnnnnnnnnnnnnnnnnnnnnnnnnnnnnnnnnnnnnnnnnnnnnnnnnnnnnnnnnnnnnnnnnnnnnnnnnnnnnnnnnnnnnnnnnnnnnnnnnnnnnnnnnnnnnnnnnnnnnnnnnnnnnnnnnnnnnnnnnnnnnnnnnnnnnnnnnnnnnnnnnnnnnnnnnnnnnnnnnnnnnnnnnnnnnnnnnnnnnnnnnnnnnnnnnnnnnnnnnnnnnnnnnnnnnnnnnnnnnnnnnnnnnnnnnnnnnnnnnnnnnnnnnnnnnnnnnnnnnnnnnnnnnnnnnnnnnnnnnnnnnnnnnnnnnnnnnnnnnnnnnnnnnnnnnnnnnnnnnnnnnnnnnnnnnnnnnnnnnnnnnnnnnnnnnnnnnnnnnnnnnnnnnnnnnnnnnnnnnnnnnnnnnnnnnnnnnnnnnnnnnnnnnnnnnnnnnnnnnnnnnnnnnnnnnnnnnnnnnnnnnnnnnnnnnnnnnnnnnnnnnnnnnnnnnnnnnnnnnnnnnnnnnnnnnnnnnnnnnnnnnnnnnnnnnnnnnnnnnnnnnnnnnnnnnnnnnnnnnnnnnnnnnnnnnnnnnnnnnnnnnnnnnnnnnnnnnnnnnnnnnnnnnnnnnnnnnnnnnnnnnnnnnnnnnnnnnnnnnnnnnnnnnnnnnnnnnnnnnnnnnnnnnnnnnnnnnnnnnnnnnnnnnnnnnnnnnnnnnnnnnnnnnnnnnnnnnnnnnnnnnnnnnnnnnnnnnnnnnnnnnnnnnnnnnnnnnnnnnnnnnnnnnnnnnnnnnnnnnnnnnnnnnnnnnnnnnnnnnnnnnnnnnnnnnnnnnnnnnnnnnnnnnnnnnnnnnnnnnnnnnnnnnnnnnnnnnnnnnnnnnnnnnnnnnnnnnnnnnnnnnnnnnnnnnnnnnnnnnnnnnnnnnnnnnnnnnnnnnnnnnnnnnnnnnnnnnnnnnnnnnnnnnnnnnnnnnnnnnnnnnnnnnnnnnnnnnnnnnnnnnnnnnnnnnnnnnnnnnnnnnnnnnnnnnnnnnnnnnnnnnnnnnnnnnnnnnnnnnnnnnnnnnnnnnnnnnnnnnnnnnnnnnnnnnnnnnnnnnnnnnnnnnnnnnnnnnnnnnnnnnnnnnnnnnnnnnnnnnnnnnnnnnnnnnnnnnnnnnnnnnnnnnnnnnnnnnnnnnnnnnnnnnnnnnnnnnnnnnnnnnnnnnnnnnnnnnnnnnnnnnnnnnnnnnnnnnnnnnnnnnnnnnnnnnnnnnnnnnnnnnnnnnnnnnnnnnnnnnnnnnnnnnnnnnnnnnnnnnnnnnnnnnnnnnnnnnnnnnnnnnnnnnnnnnnnnnnnnnnnnnnnnnnnnnnnnnnnnnnnnnnnnnnnnnnnnnnnnnnnnnnnnnnnnnnnnnnnnnnnnnnnnnnnnnnnnnnnnnnnnnnnnnnnnnnnnnnnnnnnnnnnnnnnnnnnnnnnnnnnnnnnnnnnnnnnnnnnnnnnnnnnnnnnnnnnnnnnnnnnnnnnnnnnnnnnnnnnnnnnnnnnnnnnnnnnnnnnnnnnnnnnnnnnnnnnnnnnnnnnnnnnnnnnnnnnnnnnnnnnnnnnnnnnnnnnnnnnnnnnnnnnnnnnnnnnnnnnnnnnnnnnnnnnnnnnnnnnnnnnnnnnnnnnnnnnnnnnnnnnnnnnnnnnnnnnnnnnnnnnnnnnnnnnnnnnnnnnnnnnnnnnnnnnnnnnnnnnnnnnnnnnnnnnnnnnnnnnnnnnnnnnnnnnnnnnnnnnnnnnnnnnnnnnnnnnnnnnnnnnnnnnnnnnnnnnnnnnnnnnnnnnnnnnnnnnnnnnnnnnnnnnnnnnnnnnnnnnnnnnnnnnnnnnnnnnnnnnnnnnnnnnnnnnnnnnnnnnnnnnnnnnnnnnnnnnnnnnnnnnnnnnnnnnnnnnnnnnnnnnnnnnnnnnnnnnnnnnnnnnnnnnnnnnnnnnnnnnnnnnnnnnnnnnnnnnnnnnnnnnnnnnnnnnnnnnnnnnnnnnnnnnnnnnnnnnnnnnnnnnnnnnnnnnnnnnnnnnnnnnnnnnnnnnnnnnnnnnnnnnnnnnnnnnnnnnnnnnnnnnnnnnnnnnnnnnnnnnnnnnnnnnnnnnnnnnnnnnnnnnnnnnnnnnnnnnnnnnnnnnnnnnnnnnnnnnnnnnnnnnnnnnnnnnnnnnnnnnnnnnnnnnnnnnnnnnnnnnnnnnnnnnnnnnnnnnnnnnnnnnnnnnnnnnnnnnnnnnnnnnnnnnnnnnnnnnnnnnnnnnnnnnnnnnnnnnnnnnnnnnnnnnnnnnnnnnnnnnnnnnnnnnnnnnnnnnnnnnnnnnnnnnnnnnnnnnnnnnnnnnnnnnnnnnnnnnnnnnnnnnnnnnnnnnnnnnnnnnnnnnnnnnnnnnnnnnnnnnnnnnnnnnnnnnnnnnnnnnnnnnnnnnnnnnnnnnnnnnnnnnnnnnnnnnnnnnnnnnnnnnnnnnnnnnnnnnnnnnnnnnnnnnnnnnnnnnnnnnnnnnnnnnnnnnnnnnnnnnnnnnnnnnnnnnnnnnnnnnnnnnnnnnnnnnnnnnnnnnnnnnnnnnnnnnnnnnnnnnnnnnnnnnnnnnnnnnnnnnnnnnnnnnnnnnnnnnnnnnnnnnnnnnnnnnnnnnnnnnnnnnnnnnnnnnnnnnnnnnnnnnnnnnnnnnnnnnnnnnnnnnnnnnnnnnnnnnnnnnnnnnnnnnnnnnnnnnnnnnnnnnnnnnnnnnnnnnnnnnnnnnnnnnnnnnnnnnnnnnnnnnnnnnnnnnnnnnnnnnnnnnnnnnnnnnnnnnnnnnnnnnnnnnnnnnnnnnnnnnnnnnnnnnnnnnnnnnnnnnnnnnnnnnnnnnnnnnnnnnnnnnnnnnnnnnnnnnnnnnnnnnnnnnnnnnnnnnnnnnnnnnnnnnnnnnnnnnnnnnnnnnnnnnnnnnnnnnnnnnnnnnnnnnnnnnnnnnnnnnnnnnnnnnnnnnnnnnnnnnnnnnnnnnnnnnnnnnnnnnnnnnnnnnnnnnnnnnnnnnnnnnnnnnnnnnnnnnnnnnnnnnnnnnnnnnnnnnnnnnnnnnnnnnnnnnnnnnnnnnnnnnnnnnnnnnnnnnnnnnnnnnnnnnnnnnnnnnnnnnnnnnnnnnnnnnnnnnnnnnnnnnnnnnnnnnnnnnnnnnnnnnnnnnnnnnnnnnnnnnnnnnnnnnnnnnnnnnnnnnnnnnnnnnnnnnnnnnnnnnnnnnnnnnnnnnnnnnnnnnnnnnnnnnnnnnnnnnnnnnnnnnnnnnnnnnnnnnnnnnnnnnnnnnnnnnnnnnnnnnnnnnnnnnnnnnnnnnnnnnnnnnnnnnnnnnnnnnnnnnnnnnnnnnnnnnnnnnnnnnnnnnnnnnnnnnnnnnnnnnnnnnnnnnnnnnnnnnnnnnnnnnnnnnnnnnnnnnnnnnnnnnnnnnnnnnnnnnnnnnnnnnnnnnnnnnnnnnnnnnnnnnnnnnnnnnnnnnnnnnnnnnnnnnnnnnnnnnnnnnnnnnnnnnnnnnnnnnnnnnnnnnnnnnnnnnnnnnnnnnnnnnnnnnnnnnnnnnnnnnnnnnnnnnnnnnnnnnnnnnnnnnnnnnnnnnnnnnnnnnnnnnnnnnnnnnnnnnnnnnnnnnnnnnnnnnnnnnnnnnnnnnnnnnnnnnnnnnnnnnnnnnnnnnnnnnnnnnnnnnnnnnnnnnnnnnnnnnnnnnnnnnnnnnnnnnnnnnnnnnnnnnnnnnnnnnnnnnnnnnnnnnnnnnnnnnnnnnnnnnnnnnnnnnnnnnnnnnnnnnnnnnnnnnnnnnnnnnnnnnnnnnnnnnnnnnnnnnnnnnnnnnnnnnnnnnnnnnnnnnnnnnnnnnnnnnnnnnnnnnnnnnnnnnnnnnnnnnnnnnnnnnnnnnnnnnnnnnnnnnnnnnnnnnnnnnnnnnnnnnnnnnnnnnnnnnnnnnnnnnnnnnnnnnnnnnnnnnnnnnnnnnnnnnnnnnnnnnnnnnnnnnnnnnnnnnnnnnnnnnnnnnnnnnnnnnnnnnnnnnnnnnnnnnnnnnnnnnnnnnnnnnnnnnnnnnnnnnnnnnnnnnnnnnnnnnnnnnnnnnnnnnnnnnnnnnnnnnnnnnnnnnnnnnnnnnnnnnnnnnnnnnnnnnnnnnnnnnnnnnnnnnnnnnnnnnnnnnnnnnnnnnnnnnnnnnnnnnnnnnnnnnnnnnnnnnnnnnnnnnnnnnnnnnnnnnnnnnnnnnnnnnnnnnnnnnnnnnnnnnnnnnnnnnnnnnnnnnnnnnnnnnnnnnnnnnnnnnnnnnnnnnnnnnnnnnnnnnnnnnnnnnnnnnnnnnnnnnnnnnnnnnnnnnnnnnnnnnnnnnnnnnnnnnnnnnnnnnnnnnnnnnnnnnnnnnnnnnnnnnnnnnnnnnnnnnnnnnnnnnnnnnnnnnnnnnnnnnnnnnnnnnnnnnnnnnnnnnnnnnnnnnnnnnnnnnnnnnnnnnnnnnnnnnnnnnnnnnnnnnnnnnnnnnnnnnnnnnnnnnnnnnnnnnnnnnnnnnnnnnnnnnnnnnnnnnnnnnnnnnnnnnnnnnnnnnnnnnnnnnnnnnnnnnnnnnnnnnnnnnnnnnnnnnnnnnnnnnnnnnnnnnnnnnnnnnnnnnnnnnnnnnnnnnnnnnnnnnnnnnnnnnnnnnnnnnnnnnnnnnnnnnnnnnnnnnnnnnnnnnnnnnnnnnnnnnnnnnnnnnnnnnnnnnnnnnnnnnnnnnnnnnnnnnnnnnnnnnnnnnnnnnnnnnnnnnnnnnnnnnnnnnnnnnnnnnnnnnnnnnnnnnnnnnnnnnnnnnnnnnnnnnnnnnnnnnnnnnnnnnnnnnnnnnnnnnnnnnnnnnnnnnnnnnnnnnnnnnnnnnnnnnnnnnnnnnnnnnnnnnnnnnnnnnnnnnnnnnnnnnnnnnnnnnnnnnnnnnnnnnnnnnnnnnnnnnnnnnnnnnnnnnnnnnnnnnnnnnnnnnnnnnnnnnnnnnnnnnnnnnnnnnnnnnnnnnnnnnnnnnnnnnnnnnnnnnnnnnnnnnnnnnnnnnnnnnnnnnnnnnnnnnnnnnnnnnnnnnnnnnnnnnnnnnnnnnnnnnnnnnnnnnnnnnnnnnnnnnnnnnnnnnnnnnnnnnnnnnnnnnnnnnnnnnnnnnnnnnnnnnnnnnnnnnnnnnnnnnnnnnnnnnnnnnnnnnnnnnnnnnnnnnnnnnnnnnnnnnnnnnnnnnnnnnnnnnnnnnnnnnnnnnnnnnnnnnnnnnnnnnnnnnnnnnnnnnnnnnnnnnnnnnnnnnnnnnnnnnnnnnnnnnnnnnnnnnnnnnnnnnnnnnnnnnnnnnnnnnnnnnnnnnnnnnnnnnnnnnnnnnnnnnnnnnnnnnnnnnnnnnnnnnnnnnnnnnnnnnnnnnnnnnnnnnnnnnnnnnnnnnnnnnnnnnnnnnnnnnnnnnnnnnnnnnnnnnnnnnnnnnnnnnnnnnnnnnnnnnnnnnnnnnnnnnnnnnnnnnnnnnnnnnnnnnnnnnnnnnnnnnnnnnnnnnnnnnnnnnnnnnnnnnnnnnnnnnnnnnnnnnnnnnnnnnnnnnnnnnnnnnnnnnnnnnnnnnnnnnnnnnnnnnnnnnnnnnnnnnnnnnnnnnnnnnnnnnnnnnnnnnnnnnnnnnnnnnnnnnnnnnnnnnnnnnnnnnnnnnnnnnnnnnnnnnnnnnnnnnnnnnnnnnnnnnnnnnnnnnnnnnnnnnnnnnnnnnnnnnnnnnnnnnnnnnnnnnnnnnnnnnnnnnnnnnnnnnnnnnnnnnnnnnnnnnnnnnnnnnnnnnnnnnnnnnnnnnnnnnnnnnnnnnnnnnnnnnnnnnnnnnnnnnnnnnnnnnnnnnnnnnnnnnnnnnnnnnnnnnnnnnnnnnnnnnnnnnnnnnnnnnnnnnnnnnnnnnnnnnnnnnnnnnnnnnnnnnnnnnnnnnnnnnnnnnnnnnnnnnnnnnnnnnnnnnnnnnnnnnnnnnnnnnnnnnnnnnnnnnnnnnnnnnnnnnnnnnnnnnnnnnnnnnnnnnnnnnnnnnnnnnnnnnnnnnnnnnnnnnnnnnnnnnnnnnnnnnnnnnnnnnnnnnnnnnnnnnnnnnnnnnnnnnnnnnnnnnnnnnnnnnnnnnnnnnnnnnnnnnnnnnnnnnnnnnnnnnnnnnnnnnnnnnnnnnnnnnnnnnnnnnnnnnnnnnnnnnnnnnnnnnnnnnnnnnnnnnnnnnnnnnnnnnnnnnnnnnnnnnnnnnnnnnnnnnnnnnnnnnnnnnnnnnnnnnnnnnnnnnnnnnnnnnnnnnnnnnnnnnnnnnnnnnnnnnnnnnnnnnnnnnnnnnnnnnnnnnnnnnnnnnnnnnnnnnnnnnnnnnnnnnnnnnnnnnnnnnnnnnnnnnnnnnnnnnnnnnnnnnnnnnnnnnnnnnnnnnnnnnnnnnnnnnnnnnnnnnnnnnnnnnnnnnnnnnnnnnnnnnnnnnnnnnnnnnnnnnnnnnnnnnnnnnnnnnnnnnnnnnnnnnnnnnnnnnnnnnnnnnnnnnnnnnnnnnnnnnnnnnnnnnnnnnnnnnnnnnnnnnnnnnnnnnnnnnnnnnnnnnnnnnnnnnnnnnnnnnnnnnnnnnnnnnnnnnnnnnnnnnnnnnnnnnnnnnnnnnnnnnnnnnnnnnnnnnnnnnnnnnnnnnnnnnnnnnnnnnnnnnnnnnnnnnnnnnnnnnnnnnnnnnnnnnnnnnnnnnnnnnnnnnnnnnnnnnnnnnnnnnnnnnnnnnnnnnnnnnnnnnnnnnnnnnnnnnnnnnnnnnnnnnnnnnnnnnnnnnnnnnnnnnnnnnnnnnnnnnnnnnnnnnnnnnnnnnnnnnnnnnnnnnnnnnnnnnnnnnnnnnnnnnnnnnnnnnnnnnnnnnnnnnnnnnnnnnnnnnnnnnnnnnnnnnnnnnnnnnnnnnnnnnnnnnnnnnnnnnnnnnnnnnnnnnnnnnnnnnnnnnnnnnnnnnnnnnnnnnnnnnnnnnnnnnnnnnnnnnnnnnnnnnnnnnnnnnnnnnnnnnnnnnnnnnnnnnnnnnnnnnnnnnnnnnnnnnnnnnnnnnnnnnnnnnnnnnnnnnnnnnnnnnnnnnnnnnnnnnnnnnnnnnnnnnnnnnnnnnnnnnnnnnnnnnnnnnnnnnnnnnnnnnnnnnnnnnnnnnnnnnnnnnnnnnnnnnnnnnnnnnnnnnnnnnnnnnnnnnnnnnnnnnnnnnnnnnnnnnnnnnnnnnnnnnnnnnnnnnnnnnnnnnnnnnnnnnnnnnnnnnnnnnnnnnnnnnnnnnnnnnnnnnnnnnnnnnnnnnnnnnnnnnnnnnnnnnnnnnnnnnnnnnnnnnnnnnnnnnnnnnnnnnnnnnnnnnnnnnnnnnnnnnnnnnnnnnnnnnnnnnnnnnnnnnnnnnnnnnnnnnnnnnnnnnnnnnnnnnnnnnnnnnnnnnnnnnnnnnnnnnnnnnnnnnnnnnnnnnnnnnnnnnnnnnnnnnnnnnnnnnnnnnnnnnnnnnnnnnnnnnnnnnnnnnnnnnnnnnnnnnnnnnnnnnnnnnnnnnnnnnnnnnnnnnnnnnnnnnnnnnnnnnnnnnnnnnnnnnnnnnnnnnnnnnnnnnnnnnnnnnnnnnnnnnnnnnnnnnnnnnnnnnnnnnnnnnnnnnnnnnnnnnnnnnnnnnnnnnnnnnnnnnnnnnnnnnnnnnnnnnnnnnnnnnnnnnnnnnnnnnnnnnnnnnnnnnnnnnnnnnnnnnnnnnnnnnnnnnnnnnnnnnnnnnnnnnnnnnnnnnnnnnnnnnnnnnnnnnnnnnnnnnnnnnnnnnnnnnnnnnnnnnnnnnnnnnnnnnnnnnnnnnnnnnnnnnnnnnnnnnnnnnnnnnnnnnnnnnnnnnnnnnnnnnnnnnnnnnnnnnnnnnnnnnnnnnnnnnnnnnnnnnnnnnnnnnnnnnnnnnnnnnnnnnnnnnnnnnnnnnnnnnnnnnnnnnnnnnnnnnnnnnnnnnnnnnnnnnnnnnnnnnnnnnnnnnnnnnnnnnnnnnnnnnnnnnnnnnnnnnnnnnnnnnnnnnnnnnnnnnnnnnnnnnnnnnnnnnnnnnnnnnnnnnnnnnnnnnnnnnnnnnnnnnnnnnnnnnnnnnnnnnnnnnnnnnnnnnnnnnnnnnnnnnnnnnnnnnnnnnnnnnnnnnnnnnnnnnnnnnnnnnnnnnnnnnnnnnnnnnnnnnnnnnnnnnnnnnnnnnnnnnnnnnnnnnnnnnnnnnnnnnnnnnnnnnnnnnnnnnnnnnnnnnnnnnnnnnnnnnnnnnnnnnnnnnnnnnnnnnnnnnnnnnnnnnnnnnnnnnnnnnnnnnnnnnnnnnnnnnnnnnnnnnnnnnnnnnnnnnnnnnnnnnnnnnnnnnnnnnnnnnnnnnnnnnnnnnnnnnnnnnnnnnnnnnnnnnnnnnnnnnnnnnnnnnnnnnnnnnnnnnnnnnnnnnnnnnnnnnnnnnnnnnnnnnnnnnnnnnnnnnnnnnnnnnnnnnnnnnnnnnnnnnnnnnnnnnnnnnnnnnnnnnnnnnnnnnnnnnnnnnnnnnnnnnnnnnnnnnnnnnnnnnnnnnnnnnnnnnnnnnnnnnnnnnnnnnnnnnnnnnnnnnnnnnnnnnnnnnnnnnnnnnnnnnnnnnnnnnnnnnnnnnnnnnnnnnnnnnnnnnnnnnnnnnnnnnnnnnnnnnnnnnnnnnnnnnnnnnnnnnnnnnnnnnnnnnnnnnnnnnnnnnnnnnnnnnnnnnnnnnnnnnnnnnnnnnnnnnnnnnnnnnnnnnnnnnnnnnnnnnnnnnnnnnnnnnnnnnnnnnnnnnnnnnnnnnnnnnnnnnnnnnnnnnnnnnnnnnnnnnnnnnnnnnnnnnnnnnnnnnnnnnnnnnnnnnnnnnnnnnnnnnnnnnnnnnnnnnnnnnnnnnnnnnnnnnnnnnnnnnnnnnnnnnnnnnnnnnnnnnnnnnnnnnnnnnnnnnnnnnnnnnnnnnnnnnnnnnnnnnnnnnnnnnnnnnnnnnnnnnnnnnnnnnnnnnnnnnnnnnnnnnnnnnnnnnnnnnnnnnnnnnnnnnnnnnnnnnnnnnnnnnnnnnnnnnnnnnnnnnnnnnnnnnnnnnnnnnnnnnnnnnnnnnnnnnnnnnnnnnnnnnnnnnnnnnnnnnnnnnnnnnnnnnnnnnnnnnnnnnnnnnnnnnnnnnnnnnnnnnnnnnnnnnnnnnnnnnnnnnnnnnnnnnnnnnnnnnnnnnnnnnnnnnnnnnnnnnnnnnnnnnnnnnnnnnnnnnnnnnnnnnnnnnnnnnnnnnnnnnnnnnnnnnnnnnnnnnnnnnnnnnnnnnnnnnnnnnnnnnnnnnnnnnnnnnnnnnnnnnnnnnnnnnnnnnnnnnnnnnnnnnnnnnnnnnnnnnnnnnnnnnnnnnnnnnnnnnnnnnnnnnnnnnnnnnnnnnnnnnnnnnnnnnnnnnnnnnnnnnnnnnnnnnnnnnnnnnnnnnnnnnnnnnnnnnnnnnnnnnnnnnnnnnnnnnnnnnnnnnnnnnnnnnnnnnnnnnnnnnnnnnnnnnnnnnnnnnnnnnnnnnnnnnnnnnnnnnnnnnnnnnnnnnnnnnnnnnnnnnnnnnnnnnnnnnnnnnnnnnnnnnnnnnnnnnnnnnnnnnnnnnnnnnnnnnnnnnnnnnnnnnnnnnnnnnnnnnnnnnnnnnnnnnnnnnnnnnnnnnnnnnnnnnnnnnnnnnnnnnnnnnnnnnnnnnnnnnnnnnnnnnnnnnnnnnnnnnnnnnnnnnnnnnnnnnnnnnnnnnnnnnnnnnnnnnnnnnnnnnnnnnnnnnnnnnnnnnnnnnnnnnnnnnnnnnnnnnnnnnnnnnnnnnnnnnnnnnnnnnnnnnnnnnnnnnnnnnnnnnnnnnnnnnnnnnnnnnnnnnnnnnnnnnnnnnnnnnnnnnnnnnnnnnnnnnnnnnnnnnnnnnnnnnnnnnnnnnnnnnnnnnnnnnnnnnnnnnnnnnnnnnnnnnnnnnnnnnnnnnnnnnnnnnnnnnnnnnnnnnnnnnnnnnnnnnnnnnnnnnnnnnnnnnnnnnnnnnnnnnnnnnnnnnnnnnnnnnnnnnnnnnnnnnnnnnnnnnnnnnnnnnnnnnnnnnnnnnnnnnnnnnnnnnnnnnnnnnnnnnnnnnnnnnnnnnnnnnnnnnnnnnnnnnnnnnnnnnnnnnnnnnnnnnnnnnnnnnnnnnnnnnnnnnnnnnnnnnnnnnnnnnnnnnnnnnnnnnnnnnnnnnnnnnnnnnnnnnnnnnnnnnnnnnnnnnnnnnnnnnnnnnnnnnnnnnnnnnnnnnnnnnnnnnnnnnnnnnnnnnnnnnnnnnnnnnnnnnnnnnnnnnnnnnnnnnnnnnnnnnnnnnnnnnnnnnnnnnnnnnnnnnnnnnnnnnnnnnnnnnnnnnnnnnnnnnnnnnnnnnnnnnnnnnnnnnnnnnnnnnnnnnnnnnnnnnnnnnnnnnnnnnnnnnnnnnnnnnnnnnnnnnnnnnnnnnnnnnnnnnnnnnnnnnnnnnnnnnnnnnnnnnnnnnnnnnnnnnnnnnnnnnnnnnnnnnnnnnnnnnnnnnnnnnnnnnnnnnnnnnnnnnnnnnnnnnnnnnnnnnnnnnnnnnnnnnnnnnnnnnnnnnnnnnnnnnnnnnnnnnnnnnnnnnnnnnnnnnnnnnnnnnnnnnnnnnnnnnnnnnnnnnnnnnnnnnnnnnnnnnnnnnnnnnnnnnnnnnnnnnnnnnnnnnnnnnnnnnnnnnnnnnnnnnnnnnnnnnnnnnnnnnnnnnnnnnnnnnnnnnnnnnnnnnnnnnnnnnnnnnnnnnnnnnnnnnnnnnnnnnnnnnnnnnnnnnnnnnnnnnnnnnnnnnnnnnnnnnnnnnnnnnnnnnnnnnnnnnnnnnnnnnnnnnnnnnnnnnnnnnnnnnnnnnnnnnnnnnnnnnnnnnnnnnnnnnnnnnnnnnnnnnnnnnnnnnnnnnnnnnnnnnnnnnnnnnnnnnnnnnnnnnnnnnnnnnnnnnnnnnnnnnnnnnnnnnnnnnnnnnnnnnnnnnnnnnnnnnnnnnnnnnnnnnnnnnnnnnnnnnnnnnnnnnnnnnnnnnnnnnnnnnnnnnnnnnnnnnnnnnnnnnnnnnnnnnnnnnnnnnnnnnnnnnnnnnnnnnnnnnnnnnnnnnnnnnnnnnnnnnnnnnnnnnnnnnnnnnnnnnnnnnnnnnnnnnnnnnnnnnnnnnnnnnnnnnnnnnnnnnnnnnnnnnnnnnnnnnnnnnnnnnnnnnnnnnnnnnnnnnnnnnnnnnnnnnnnnnnnnnnnnnnnnnnnnnnnnnnnnnnnnnnnnnnnnnnnnnnnnnnnnnnnnnnnnnnnnnnnnnnnnnnnnnnnnnnnnnnnnnnnnnnnnnnnnnnnnnnnnnnnnnnnnnnnnnnnnnnnnnnnnnnnnnnnnnnnnnnnnnnnnnnnnnnnnnnnnnnnnnnnnnnnnnnnnnnnnnnnnnnnnnnnnnnnnnnnnnnnnnnnnnnnnnnnnnnnnnnnnnnnnnnnnnnnnnnnnnnnnnnnnnnnnnnnnnnnnnnnnnnnnnnnnnnnnnnnnnnnnnnnnnnnnnnnnnnnnnnnnnnnnnnnnnnnnnnnnnnnnnnnnnnnnnnnnnnnnnnnnnnnnnnnnnnnnnnnnnnnnnnnnnnnnnnnnnnnnnnnnnnnnnnnnnnnnnnnnnnnnnnnnnnnnnnnnnnnnnnnnnnnnnnnnnnnnnnnnnnnnnnnnnnnnnnnnnnnnnnnnnnnnnnnnnnnnnnnnnnnnnnnnnnnnnnnnnnnnnnnnnnnnnnnnnnnnnnnnnnnnnnnnnnnnnnnnnnnnnnnnnnnnnnnnnnnnnnnnnnnnnnnnnnnnnnnnnnnnnnnnnnnnnnnnnnnnnnnnnnnnnnnnnnnnnnnnnnnnnnnnnnnnnnnnnnnnnnnnnnnnnnnnnnnnnnnnnnnnnnnnnnnnnnnnnnnnnnnnnnnnnnnnnnnnnnnnnnnnnnnnnnnnnnnnnnnnnnnnnnnnnnnnnnnnnnnnnnnnnnnnnnnnnnnnnnnnnnnnnnnnnnnnnnnnnnnnnnnnnnnnnnnnnnnnnnnnnnnnnnnnnnnnnnnnnnnnnnnnnnnnnnnnnnnnnnnnnnnnnnnnnnnnnnnnnnnnnnnnnnnnnnnnnnnnnnnnnnnnnnnnnnnnnnnnnnnnnnnnnnnnnnnnnnnnnnnnnnnnnnnnnnnnnnnnnnnnnnnnnnnnnnnnnnnnnnnnnnnnnnnnnnnnnnnnnnnnnnnnnnnnnnnnnnnnnnnnnnnnnnnnnnnnnnnnnnnnnnnnnnnnnnnnnnnnnnnnnnnnnnnnnnnnnnnnnnnnnnnnnnnnnnnnnnnnnnnnnnnnnnnnnnnnnnnnnnnnnnnnnnnnnnnnnnnnnnnnnnnnnnnnnnnnnnnnnnnnnnnnnnnnnnnnnnnnnnnnnnnnnnnnnnnnnnnnnnnnnnnnnnnnnnnnnnnnnnnnnnnnnnnnnnnnnnnnnnnnnnnnnnnnnnnnnnnnnnnnnnnnnnnnnnnnnnnnnnnnnnnnnnnnnnnnnnnnnnnnnnnnnnnnnnnnnnnnnnnnnnnnnnnnnnnnnnnnnnnnnnnnnnnnnnnnnnnnnnnnnnnnnnnnnnnnnnnnnnnnnnnnnnnnnnnnnnnnnnnnnnnnnnnnnnnnnnnnnnnnnnnnnnnnnnnnnnnnnnnnnnnnnnnnnnnnnnnnnnnnnnnnnnnnnnnnnnnnnnnnnnnnnnnnnnnnnnnnnnnnnnnnnnnnnnnnnnnnnnnnnnnnnnnnnnnnnnnnnnnnnnnnnnnnnnnnnnnnnnnnnnnnnnnnnnnnnnnnnnnnnnnnnnnnnnnnnnnnnnnnnnnnnnnnnnnnnnnnnnnnnnnnnnnnnnnnnnnnnnnnnnnnnnnnnnnnnnnnnnnnnnnnnnnnnnnnnnnnnnnnnnnnnnnnnnnnnnnnnnnnnnnnnnnnnnnnnnnnnnnnnnnnnnnnnnnnnnnnnnnnnnnnnnnnnnnnnnnnnnnnnnnnnnnnnnnnnnnnnnnnnnnnnnnnnnnnnnnnnnnnnnnnnnnnnnnnnnnnnnnnnnnnnnnnnnnnnnnnnnnnnnnnnnnnnnnnnnnnnnnnnnnnnnnnnnnnnnnnnnnnnnnnnnnnnnnnnnnnnnnnnnnnnnnnnnnnnnnnnnnnnnnnnnnnnnnnnnnnnnnnnnnnnnnnnnnnnnnnnnnnnnnnnnnnnnnnnnnnnnnnnnnnnnnnnnnnnnnnnnnnnnnnnnnnnnnnnnnnnnnnnnnnnnnnnnnnnnnnnnnnnnnnnnnnnnnnnnnnnnnnnnnnnnnnnnnnnnnnnnnnnnnnnnnnnnnnnnnnnnnnnnnnnnnnnnnnnnnnnnnnnnnnnnnnnnnnnnnnnnnnnnnnnnnnnnnnnnnnnnnnnnnnnnnnnnnnnnnnnnnnnnnnnnnnnnnnnnnnnnnnnnnnnnnnnnnnnnnnnnnnnnnnnnnnnnnnnnnnnnnnnnnnnnnnnnnnnnnnnnnnnnnnnnnnnnnnnnnnnnnnnnnnnnnnnnnnnnnnnnnnnnnnnnnnnnnnnnnnnnnnnnnnnnnnnnnnnnnnnnnnnnnnnnnnnnnnnnnnnnnnnnnnnnnnnnnnnnnnnnnnnnnnnnnnnnnnnnnnnnnnnnnnnnnnnnnnnnnnnnnnnnnnnnnnnnnnnnnnnnnnnnnnnnnnnnnnnnnnnnnnnnnnnnnnnnnnnnnnnnnnnnnnnnnnnnnnnnnnnnnnnnnnnnnnnnnnnnnnnnnnnnnnnnnnnnnnnnnnnnnnnnnnnnnnnnnnnnnnnnnnnnnnnnnnnnnnnnnnnnnnnnnnnnnnnnnnnnnnnnnnnnnnnnnnnnnnnnnnnnnnnnnnnnnnnnnnnnnnnnnnnnnnnnnnnnnnnnnnnnnnnnnnnnnnnnnnnnnnnnnnnnnnnnnnnnnnnnnnnnnnnnnnnnnnnnnnnnnnnnnnnnnnnnnnnnnnnnnnnnnnnnnnnnnnnnnnnnnnnnnnnnnnnnnnnnnnnnnnnnnnnnnnnnnnnnnnnnnnnnnnnnnnnnnnnnnnnnnnnnnnnnnnnnnnnnnnnnnnnnnnnnnnnnnnnnnnnnnnnnnnnnnnnnnnnnnnnnnnnnnnnnnnnnnnnnnnnnnnnnnnnnnnnnnnnnnnnnnnnnnnnnnnnnnnnnnnnnnnnnnnnnnnnnnnnnnnnnnnnnnnnnnnnnnnnnnnnnnnnnnnnnnnnnnnnnnnnnnnnnnnnnnnnnnnnnnnnnnnnnnnnnnnnnnnnnnnnnnnnnnnnnnnnnnnnnnnnnnnnnnnnnnnnnnnnnnnnnnnnnnnnnnnnnnnnnnnnnnnnnnnnnnnnnnnnnnnnnnnnnnnnnnnnnnnnnnnnnnnnnnnnnnnnnnnnnnnnnnnnnnnnnnnnnnnnnnnnnnnnnnnnnnnnnnnnnnnnnnnnnnnnnnnnnnnnnnnnnnnnnnnnnnnnnnnnnnnnnnnnnnnnnnnnnnnnnnnnnnnnnnnnnnnnnnnnnnnnnnnnnnnnnnnnnnnnnnnnnnnnnnnnnnnnnnnnnnnnnnnnnnnnnnnnnnnnnnnnnnnnnnnnnnnnnnnnnnnnnnnnnnnnnnnnnnnnnnnnnnnnnnnnnnnnnnnnnnnnnnnnnnnnnnnnnnnnnnnnnnnnnnnnnnnnnnnnnnnnnnnnnnnnnnnnnnnnnnnnnnnnnnnnnnnnnnnnnnnnnnnnnnnnnnnnnnnnnnnnnnnnnnnnnnnnnnnnnnnnnnnnnnnnnnnnnnnnnnnnnnnnnnnnnnnnnnnnnnnnnnnnnnnnnnnnnnnnnnnnnnnnnnnnnnnnnnnnnnnnnnnnnnnnnnnnnnnnnnnnnnnnnnnnnnnnnnnnnnnnnnnnnnnnnnnnnnnnnnnnnnnnnnnnnnnnnnnnnnnnnnnnnnnnnnnnnnnnnnnnnnnnnnnnnnnnnnnnnnnnnnnnnnnnnnnnnnnnnnnnnnnnnnnnnnnnnnnnnnnnnnnnnnnnnnnnnnnnnnnnnnnnnnnnnnnnnnnnnnnnnnnnnnnnnnnnnnnnnnnnnnnnnnnnnnnnnnnnnnnnnnnnnnnnnnnnnnnnnnnnnnnnnnnnnnnnnnnnnnnnnnnnnnnnnnnnnnnnnnnnnnnnnnnnnnnnnnnnnnnnnnnnnnnnnnnnnnnnnnnnnnnnnnnnnnnnnnnnnnnnnnnnnnnnnnnnnnnnnnnnnnnnnnnnnnnnnnnnnnnnnnnnnnnnnnnnnnnnnnnnnnnnnnnnnnnnnnnnnnnnnnnnnnnnnnnnnnnnnnnnnnnnnnnnnnnnnnnnnnnnnnnnnnnnnnnnnnnnnnnnnnnnnnnnnnnnnnnnnnnnnnnnnnnnnnnnnnnnnnnnnnnnnnnnnnnnnnnnnnnnnnnnnnnnnnnnnnnnnnnnnnnnnnnnnnnnnnnnnnnnnnnnnnnnnnnnnnnnnnnnnnnnnnnnnnnnnnnnnnnnnnnnnnnnnnnnnnnnnnnnnnnnnnnnnnnnnnnnnnnnnnnnnnnnnnnnnnnnnnnnnnnnnnnnnnnnnnnnnnnnnnnnnnnnnnnnnnnnnnnnnnnnnnnnnnnnnnnnnnnnnnnnnnnnnnnnnnnnnnnnnnnnnnnnnnnnnnnnnnnnnnnnnnnnnnnnnnnnnnnnnnnnnnnnnnnnnnnnnnnnnnnnnnnnnnnnnnnnnnnnnnnnnnnnnnnnnnnnnnnnnnnnnnnnnnnnnnnnnnnnnnnnnnnnnnnnnnnnnnnnnnnnnnnnnnnnnnnnnnnnnnnnnnnnnnnnnnnnnnnnnnnnnnnnnnnnnnnnnnnnnnnnnnnnnnnnnnnnnnnnnnnnnnnnnnnnnnnnnnnnnnnnnnnnnnnnnnnnnnnnnnnnnnnnnnnnnnnnnnnnnnnnnnnnnnnnnnnnnnnnnnnnnnnnnnnnnnnnnnnnnnnnnnnnnnnnnnnnnnnnnnnnnnnnnnnnnnnnnnnnnnnnnnnnnnnnnnnnnnnnnnnnnnnnnnnnnnnnnnnnnnnnnnnnnnnnnnnnnnnnnnnnnnnnnnnnnnnnnnnnnnnnnnnnnnnnnnnnnnnnnnnnnnnnnnnnnnnnnnnnnnnnnnnnnnnnnnnnnnnnnnnnnnnnnnnnnnnnnnnnnnnnnnnnnnnnnnnnnnnnnnnnnnnnnnnnnnnnnnnnnnnnnnnnnnnnnnnnnnnnnnnnnnnnnnnnnnnnnnnnnnnnnnnnnnnnnnnnnnnnnnnnnnnnnnnnnnnnnnnnnnnnnnnnnnnnnnnnnnnnnnnnnnnnnnnnnnnnnnnnnnnnnnnnnnnnnnnnnnnnnnnnnnnnnnnnnnnnnnnnnnnnnnnnnnnnnnnnnnnnnnnnnnnnnnnnnnnnnnnnnnnnnnnnnnnnnnnnnnnnnnnnnnnnnnnnnnnnnnnnnnnnnnnnnnnnnnnnnnnnnnnnnnnnnnnnnnnnnnnnnnnnnnnnnnnnnnnnnnnnnnnnnnnnnnnnnnnnnnnnnnnnnnnnnnnnnnnnnnnnnnnnnnnnnnnnnnnnnnnnnnnnnnnnnnnnnnnnnnnnnnnnnnnnnnnnnnnnnnnnnnnnnnnnnnnnnnnnnnnnnnnnnnnnnnnnnnnnnnnnnnnnnnnnnnnnnnnnnnnnnnnnnnnnnnnnnnnnnnnnnnnnnnnnnnnnnnnnnnnnnnnnnnnnnnnnnnnnnnnnnnnnnnnnnnnnnnnnnnnnnnnnnnnnnnnnnnnnnnnnnnnnnnnnnnnnnnnnnnnnnnnnnnnnnnnnnnnnnnnnnnnnnnnnnnnnnnnnnnnnnnnnnnnnnnnnnnnnnnnnnnnnnnnnnnnnnnnnnnnnnnnnnnnnnnnnnnnnnnnnnnnnnnnnnnnnnnnnnnnnnnnnnnnnnnnnnnnnnnnnnnnnnnnnnnnnnnnnnnnnnnnnnnnnnnnnnnnnnnnnnnnnnnnnnnnnnnnnnnnnnnnnnnnnnnnnnnnnnnnnnnnnnnnnnnnnnnnnnnnnnnnnnnnnnnnnnnnnnnnnnnnnnnnnnnnnnnnnnnnnnnnnnnnnnnnnnnnnnnnnnnnnnnnnnnnnnnnnnnnnnnnnnnnnnnnnnnnnnnnnnnnnnnnnnnnnnnnnnnnnnnnnnnnnnnnnnnnnnnnnnnnnnnnnnnnnnnnnnnnnnnnnnnnnnnnnnnnnnnnnnnnnnnnnnnnnnnnnnnnnnnnnnnnnnnnnnnnnnnnnnnnnnnnnnnnnnnnnnnnnnnnnnnnnnnnnnnnnnnnnnnnnnnnnnnnnnnnnnnnnnnnnnnnnnnnnnnnnnnnnnnnnnnnnnnnnnnnnnnnnnnnnnnnnnnnnnnnnnnnnnnnnnnnnnnnnnnnnnnnnnnnnnnnnnnnnnnnnnnnnnnnnnnnnnnnnnnnnnnnnnnnnnnnnnnnnnnnnnnnnnnnnnnnnnnnnnnnnnnnnnnnnnnnnnnnnnnnnnnnnnnnnnnnnnnnnnnnnnnnnnnnnnnnnnnnnnnnnnnnnnnnnnnnnnnnnnnnnnnnnnnnnnnnnnnnnnnnnnnnnnnnnnnnnnnnnnnnnnnnnnnnnnnnnnnnnnnnnnnnnnnnnnnnnnnnnnnnnnnnnnnnnnnnnnnnnnnnnnnnnnnnnnnnnnnnnnnnnnnnnnnnnnnnnnnnnnnnnnnnnnnnnnnnnnnnnnnnnnnnnnnnnnnnnnnnnnnnnnnnnnnnnnnnnnnnnnnnnnnnnnnnnnnnnnnnnnnnnnnnnnnnnnnnnnnnnnnnnnnnnnnnnnnnnnnnnnnnnnnnnnnnnnnnnnnnnnnnnnnnnnnnnnnnnnnnnnnnnnnnnnnnnnnnnnnnnnnnnnnnnnnnnnnnnnnnnnnnnnnnnnnnnnnnnnnnnnnnnnnnnnnnnnnnnnnnnnnnnnnnnnnnnnnnnnnnnnnnnnnnnnnnnnnnnnnnnnnnnnnnnnnnnnnnnnnnnnnnnnnnnnnnnnnnnnnnnnnnnnnnnnnnnnnnnnnnnnnnnnnnnnnnnnnnnnnnnnnnnnnnnnnnnnnnnnnnnnnnnnnnnnnnnnnnnnnnnnnnnnnnnnnnnnnnnnnnnnnnnnnnnnnnnnnnnnnnnnnnnnnnnnnnnnnnnnnnnnnnnnnnnnnnnnnnnnnnnnnnnnnnnnnnnnnnnnnnnnnnnnnnnnnnnnnnnnnnnnnnnnnnnnnnnnnnnnnnnnnnnnnnnnnnnnnnnnnnnnnnnnnnnnnnnnnnnnnnnnnnnnnnnnnnnnnnnnnnnnnnnnnnnnnnnnnnnnnnnnnnnnnnnnnnnnnnnnnnnnnnnnnnnnnnnnnnnnnnnnnnnnnnnnnnnnnnnnnnnnnnnnnnnnnnnnnnnnnnnnnnnnnnnnnnnnnnnnnnnnnnnnnnnnnnnnnnnnnnnnnnnnnnnnnnnnnnnnnnnnnnnnnnnnnnnnnnnnnnnnnnnnnnnnnnnnnnnnnnnnnnnnnnnnnnnnnnnnnnnnnnnnnnnnnnnnnnnnnnnnnnnnnnnnnnnnnnnnnnnnnnnnnnnnnnnnnnnnnnnnnnnnnnnnnnnnnnnnnnnnnnnnnnnnnnnnnnnnnnnnnnnnnnnnnnnnnnnnnnnnnnnnnnnnnnnnnnnnnnnnnnnnnnnnnnnnnnnnnnnnnnnnnnnnnnnnnnnnnnnnnnnnnnnnnnnnnnnnnnnnnnnnnnnnnnnnnnnnnnnnnnnnnnnnnnnnnnnnnnnnnnnnnnnnnnnnnnnnnnnnnnnnnnnnnnnnnnnnnnnnnnnnnnnnnnnnnnnnnnnnnnnnnnnnnnnnnnnnnnnnnnnnnnnnnnnnnnnnnnnnnnnnnnnnnnnnnnnnnnnnnnnnnnnnnnnnnnnnnnnnnnnnnnnnnnnnnnnnnnnnnnnnnnnnnnnnnnnnnnnnnnnnnnnnnnnnnnnnnnnnnnnnnnnnnnnnnnnnnnnnnnnnnnnnnnnnnnnnnnnnnnnnnnnnnnnnnnnnnnnnnnnnnnnnnnnnnnnnnnnnnnnnnnnnnnnnnnnnnnnnnnnnnnnnnnnnnnnnnnnnnnnnnnnnnnnnnnnnnnnnnnnnnnnnnnnnnnnnnnnnnnnnnnnnnnnnnnnnnnnnnnnnnnnnnnnnnnnnnnnnnnnnnnnnnnnnnnnnnnnnnnnnnnnnnnnnnnnnnnnnnnnnnnnnnnnnnnnnnnnnnnnnnnnnnnnnnnnnnnnnnnnnnnnnnnnnnnnnnnnnnnnnnnnnnnnnnnnnnnnnnnnnnnnnnnnnnnnnnnnnnnnnnnnnnnnnnnnnnnnnnnnnnnnnnnnnnnnnnnnnnnnnnnnnnnnnnnnnnnnnnnnnnnnnnnnnnnnnnnnnnnnnnnnnnnnnnnnnnnnnnnnnnnnnnnnnnnnnnnnnnnnnnnnnnnnnnnnnnnnnnnnnnnnnnnnnnnnnnnnnnnnnnnnnnnnnnnnnnnnnnnnnnnnnnnnnnnnnnnnnnnnnnnnnnnnnnnnnnnnnnnnnnnnnnnnnnnnnnnnnnnnnnnnnnnnnnnnnnnnnnnnnnnnnnnnnnnnnnnnnnnnnnnnnnnnnnnnnnnnnnnnnnnnnnnnnnnnnnnnnnnnnnnnnnnnnnnnnnnnnnnnnnnnnnnnnnnnnnnnnnnnnnnnnnnnnnnnnnnnnnnnnnnnnnnnnnnnnnnnnnnnnnnnnnnnnnnnnnnnnnnnnnnnnnnnnnnnnnnnnnnnnnnnnnnnnnnnnnnnnnnnnnnnnnnnnnnnnnnnnnnnnnnnnnnnnnnnnnnnnnnnnnnnnnnnnnnnnnnnnnnnnnnnnnnnnnnnnnnnnnnnnnnnnnnnnnnnnnnnnnnnnnnnnnnnnnnnnnnnnnnnnnnnnnnnnnnnnnnnnnnnnnnnnnnnnnnnnnnnnnnnnnnnnnnnnnnnnnnnnnnnnnnnnnnnnnnnnnnnnnnnnnnnnnnnnnnnnnnnnnnnnnnnnnnnnnnnnnnnnnnnnnnnnnnnnnnnnnnnnnnnnnnnnnnnnnnnnnnnnnnnnnnnnnnnnnnnnnnnnnnnnnnnnnnnnnnnnnnnnnnnnnnnnnnnnnnnnnnnnnnnnnnnnnnnnnnnnnnnnnnnnnnnnnnnnnnnnnnnnnnnnnnnnnnnnnnnnnnnnnnnnnnnnnnnnnnnnnnnnnnnnnnnnnnnnnnnnnnnnnnnnnnnnnnnnnnnnnnnnnnnnnnnnnnnnnnnnnnnnnnnnnnnnnnnnnnnnnnnnnnnnnnnnnnnnnnnnnnnnnnnnnnnnnnnnnnnnnnnnnnnnnnnnnnnnnnnnnnnnnnnnnnnnnnnnnnnnnnnnnnnnnnnnnnnnnnnnnnnnnnnnnnnnnnnnnnnnnnnnnnnnnnnnnnnnnnnnnnnnnnnnnnnnnnnnnnnnnnnnnnnnnnnnnnnnnnnnnnnnnnnnnnnnnnnnnnnnnnnnnnnnnnnnnnnnnnnnnnnnnnnnnnnnnnnnnnnnnnnnnnnnnnnnnnnnnnnnnnnnnnnnnnnnnnnnnnnnnnnnnnnnnnnnnnnnnnnnnnnnnnnnnnnnnnnnnnnnnnnnnnnnnnnnnnnnnnnnnnnnnnnnnnnnnnnnnnnnnnnnnnnnnnnnnnnnnnnnnnnnnnnnnnnnnnnnnnnnnnnnnnnnnnnnnnnnnnnnnnnnnnnnnnnnnnnnnnnnnnnnnnnnnnnnnnnnnnnnnnnnnnnnnnnnnnnnnnnnnnnnnnnnnnnnnnnnnnnnnnnnnnnnnnnnnnnnnnnnnnnnnnnnnnnnnnnnnnnnnnnnnnnnnnnnnnnnnnnnnnnnnnnnnnnnnnnnnnnnnnnnnnnnnnnnnnnnnnnnnnnnnnnnnnnnnnnnnnnnnnnnnnnnnnnnnnnnnnnnnnnnnnnnnnnnnnnnnnnnnnnnnnnnnnnnnnnnnnnnnnnnnnnnnnnnnnnnnnnnnnnnnnnnnnnnnnnnnnnnnnnnnnnnnnnnnnnnnnnnnnnnnnnnnnnnnnnnnnnnnnnnnnnnnnnnnnnnnnnnnnnnnnnnnnnnnnnnnnnnnnnnnnnnnnnnnnnnnnnnnnnnnnnnnnnnnnnnnnnnnnnnnnnnnnnnnnnnnnnnnnnnnnnnnnnnnnnnnnnnnnnnnnnnnnnnnnnnnnnnnnnnnnnnnnnnnnnnnnnnnnnnnnnnnnnnnnnnnnnnnnnnnnnnnnnnnnnnnnnnnnnnnnnnnnnnnnnnnnnnnnnnnnnnnnnnnnnnnnnnnnnnnnnnnnnnnnnnnnnnnnnnnnnnnnnnnnnnnnnnnnnnnnnnnnnnnnnnnnnnnnnnnnnnnnnnnnnnnnnnnnnnnnnnnnnnnnnnnnnnnnnnnnnnnnnnnnnnnnnnnnnnnnnnnnnnnnnnnnnnnnnnnnnnnnnnnnnnnnnnnnnnnnnnnnnnnnnnnnnnnnnnnnnnnnnnnnnnnnnnnnnnnnnnnnnnnnnnnnnnnnnnnnnnnnnnnnnnnnnnnnnnnnnnnnnnnnnnnnnnnnnnnnnnnnnnnnnnnnnnnnnnnnnnnnnnnnnnnnnnnnnnnnnnnnnnnnnnnnnnnnnnnnnnnnnnnnnnnnnnnnnnnnnnnnnnnnnnnnnnnnnnnnnnnnnnnnnnnnnnnnnnnnnnnnnnnnnnnnnnnnnnnnnnnnnnnnnnnnnnnnnnnnnnnnnnnnnnnnnnnnnnnnnnnnnnnnnnnnnnnnnnnnnnnnnnnnnnnnnnnnnnnnnnnnnnnnnnnnnnnnnnnnnnnnnnnnnnnnnnnnnnnnnnnnnnnnnnnnnnnnnnnnnnnnnnnnnnnnnnnnnnnnnnnnnnnnnnnnnnnnnnnnnnnnnnnnnnnnnnnnnnnnnnnnnnnnnnnnnnnnnnnnnnnnnnnnnnnnnnnnnnnnnnnnnnnnnnnnnnnnnnnnnnnnnnnnnnnnnnnnnnnnnnnnnnnnnnnnnnnnnnnnnnnnnnnnnnnnnnnnnnnnnnnnnnnnnnnnnnnnnnnnnnnnnnnnnnnnnnnnnnnnnnnnnnnnnnnnnnnnnnnnnnnnnnnnnnnnnnnnnnnnnnnnnnnnnnnnnnnnnnnnnnnnnnnnnnnnnnnnnnnnnnnnnnnnnnnnnnnnnnnnnnnnnnnnnnnnnnnnnnnnnnnnnnnnnnnnnnnnnnnnnnnnnnnnnnnnnnnnnnnnnnnnnnnnnnnnnnnnnnnnnnnnnnnnnnnnnnnnnnnnnnnnnnnnnnnnnnnnnnnnnnnnnnnnnnnnnnnnnnnnnnnnnnnnnnnnnnnnnnnnnnnnnnnnnnnnnnnnnnnnnnnnnnnnnnnnnnnnnnnnnnnnnnnnnnnnnnnnnnnnnnnnnnnnnnnnnnnnnnnnnnnnnnnnnnnnnnnnnnnnnnnnnnnnnnnnnnnnnnnnnnnnnnnnnnnnnnnnnnnnnnnnnnnnnnnnnnnnnnnnnnnnnnnnnnnnnnnnnnnnnnnnnnnnnnnnnnnnnnnnnnnnnnnnnnnnnnnnnnnnnnnnnnnnnnnnnnnnnnnnnnnnnnnnnnnnnnnnnnnnnnnnnnnnnnnnnnnnnnnnnnnnnnnnnnnnnnnnnnnnnnnnnnnnnnnnnnnnnnnnnnnnnnnnnnnnnnnnnnnnnnnnnnnnnnnnnnnnnnnnnnnnnnnnnnnnnnnnnnnnnnnnnnnnnnnnnnnnnnnnnnnnnnnnnnnnnnnnnnnnnnnnnnnnnnnnnnnnnnnnnnnnnnnnnnnnnnnnnnnnnnnnnnnnnnnnnnnnnnnnnnnnnnnnnnnnnnnnnnnnnnnnnnnnnnnnnnnnnnnnnnnnnnnnnnnnnnnnnnnnnnnnnnnnnnnnnnnnnnnnnnnnnnnnnnnnnnnnnnnnnnnnnnnnnnnnnnnnnnnnnnnnnnnnnnnnnnnnnnnnnnnnnnnnnnnnnnnnnnnnnnnnnnnnnnnnnnnnnnnnnnnnnnnnnnnnnnnnnnnnnnnnnnnnnnnnnnnnnnnnnnnnnnnnnnnnnnnnnnnnnnnnnnnnnnnnnnnnnnnnnnnnnnnnnnnnnnnnnnnnnnnnnnnnnnnnnnnnnnnnnnnnnnnnnnnnnnnnnnnnnnnnnnnnnnnnnnnnnnnnnnnnnnnnnnnnnnnnnnnnnnnnnnnnnnnnnnnnnnnnnnnnnnnnnnnnnnnnnnnnnnnnnnnnnnnnnnnnnnnnnnnnnnnnnnnnnnnnnnnnnnnnnnnnnnnnnnnnnnnnnnnnnnnnnnnnnnnnnnnnnnnnnnnnnnnnnnnnnnnnnnnnnnnnnnnnnnnnnnnnnnnnnnnnnnnnnnnnnnnnnnnnnnnnnnnnnnnnnnnnnnnnnnnnnnnnnnnnnnnnnnnnnnnnnnnnnnnnnnnnnnnnnnnnnnnnnnnnnnnnnnnnnnnnnnnnnnnnnnnnnnnnnnnnnnnnnnnnnnnnnnnnnnnnnnnnnnnnnnnnnnnnnnnnnnnnnnnnnnnnnnnnnnnnnnnnnnnnnnnnnnnnnnnnnnnnnnnnnnnnnnnnnnnnnnnnnnnnnnnnnnnnnnnnnnnnnnnnnnnnnnnnnnnnnnnnnnnnnnnnnnnnnnnnnnnnnnnnnnnnnnnnnnnnnnnnnnnnnnnnnnnnnnnnnnnnnnnnnnnnnnnnnnnnnnnnnnnnnnnnnnnnnnnnnnnnnnnnnnnnnnnnnnnnnnnnnnnnnnnnnnnnnnnnnnnnnnnnnnnnnnnnnnnnnnnnnnnnnnnnnnnnnnnnnnnnnnnnnnnnnnnnnnnnnnnnnnnnnnnnnnnnnnnnnnnnnnnnnnnnnnnnnnnnnnnnnnnnnnnnnnnnnnnnnnnnnnnnnnnnnnnnnnnnnnnnnnnnnnnnnnnnnnnnnnnnnnnnnnnnnnnnnnnnnnnnnnnnnnnnnnnnnnnnnnnnnnnnnnnnnnnnnnnnnnnnnnnnnnnnnnnnnnnnnnnnnnnnnnnnnnnnnnnnnnnnnnnnnnnnnnnnnnnnnnnnnnnnnnnnnnnnnnnnnnnnnnnnnnnnnnnnnnnnnnnnnnnnnnnnnnnnnnnnnnnnnnnnnnnnnnnnnnnnnnnnnnnnnnnnnnnnnnnnnnnnnnnnnnnnnnnnnnnnnnnnnnnnnnnnnnnnnnnnnnnnnnnnnnnnnnnnnnnnnnnnnnnnnnnnnnnnnnnnnnnnnnnnnnnnnnnnnnnnnnnnnnnnnnnnnnnnnnnnnnnnnnnnnnnnnnnnnnnnnnnnnnnnnnnnnnnnnnnnnnnnnnnnnnnnnnnnnnnnnnnnnnnnnnnnnnnnnnnnnnnnnnnnnnnnnnnnnnnnnnnnnnnnnnnnnnnnnnnnnnnnnnnnnnnnnnnnnnnnnnnnnnnnnnnnnnnnnnnnnnnnnnnnnnnnnnnnnnnnnnnnnnnnnnnnnnnnnnnnnnnnnnnnnnnnnnnnnnnnnnnnnnnnnnnnnnnnnnnnnnnnnnnnnnnnnnnnnnnnnnnnnnnnnnnnnnnnnnnnnnnnnnnnnnnnnnnnnnnnnnnnnnnnnnnnnnnnnnnnnnnnnnnnnnnnnnnnnnnnnnnnnnnnnnnnnnnnnnnnnnnnnnnnnnnnnnnnnnnnnnnnnnnnnnnnnnnnnnnnnnnnnnnnnnnnnnnnnnnnnnnnnnnnnnnnnnnnnnnnnnnnnnnnnnnnnnnnnnnnnnnnnnnnnnnnnnnnnnnnnnnnnnnnnnnnnnnnnnnnnnnnnnnnnnnnnnnnnnnnnnnnnnnnnnnnnnnnnnnnnnnnnnnnnnnnnnnnnnnnnnnnnnnnnnnnnnnnnnnnnnnnnnnnnnnnnnnnnnnnnnnnnnnnnnnnnnnnnnnnnnnnnnnnnnnnnnnnnnnnnnnnnnnnnnnnnnnnnnnnnnnnnnnnnnnnnnnnnnnnnnnnnnnnnnnnnnnnnnnnnnnnnnnnnnnnnnnnnnnnnnnnnnnnnnnnnnnnnnnnnnnnnnnnnnnnnnnnnnnnnnnnnnnnnnnnnnnnnnnnnnnnnnnnnnnnnnnnnnnnnnnnnnnnnnnnnnnnnnnnnnnnnnnnnnnnnnnnnnnnnnnnnnnnnnnnnnnnnnnnnnnnnnnnnnnnnnnnnnnnnnnnnnnnnnnnnnnnnnnnnnnnnnnnnnnnnnnnnnnnnnnnnnnnnnnnnnnnnnnnnnnnnnnnnnnnnnnnnnnnnnnnnnnnnnnnnnnnnnnnnnnnnnnnnnnnnnnnnnnnnnnnnnnnnnnnnnnnnnnnnnnnnnnnnnnnnnnnnnnnnnnnnnnnnnnnnnnnnnnnnnnnnnnnnnnnnnnnnnnnnnnnnnnnnnnnnnnnnnnnnnnnnnnnnnnnnnnnnnnnnnnnnnnnnnnnnnnnnnnnnnnnnnnnnnnnnnnnnnnnnnnnnnnnnnnnnnnnnnnnnnnnnnnnnnnnnnnnnnnnnnnnnnnnnnnnnnnnnnnnnnnnnnnnnnnnnnnnnnnnnnnnnnnnnnnnnnnnnnnnnnnnnnnnnnnnnnnnnnnnnnnnnnnnnnnnnnnnnnnnnnnnnnnnnnnnnnnnnnnnnnnnnnnnnnnnnnnnnnnnnnnnnnnnnnnnnnnnnnnnnnnnnnnnnnnnnnnnnnnnnnnnnnnnnnnnnnnnnnnnnnnnnnnnnnnnnnnnnnnnnnnnnnnnnnnnnnnnnnnnnnnnnnnnnnnnnnnnnnnnnnnnnnnnnnnnnnnnnnnnnnnnnnnnnnnnnnnnnnnnnnnnnnnnnnnnnnnnnnnnnnnnnnnnnnnnnnnnnnnnnnnnnnnnnnnnnnnnnnnnnnnnnnnnnnnnnnnnnnnnnnnnnnnnnnnnnnnnnnnnnnnnnnnnnnnnnnnnnnnnnnnnnnnnnnnnnnnnnnnnnnnnnnnnnnnnnnnnnnnnnnnnnnnnnnnnnnnnnnnnnnnnnnnnnnnnnnnnnnnnnnnnnnnnnnnnnnnnnnnnnnnnnnnnnnnnnnnnnnnnnnnnnnnnnnnnnnnnnnnnnnnnnnnnnnnnnnnnnnnnnnnnnnnnnnnnnnnnnnnnnnnnnnnnnnnnnnnnnnnnnnnnnnnnnnnnnnnnnnnnnnnnnnnnnnnnnnnnnnnnnnnnnnnnnnnnnnnnnnnnnnnnnnnnnnnnnnnnnnnnnnnnnnnnnnnnnnnnnnnnnnnnnnnnnnnnnnnnnnnnnnnnnnnnnnnnnnnnnnnnnnnnnnnnnnnnnnnnnnnnnnnnnnnnnnnnnnnnnnnnnnnnnnnnnnnnnnnnnnnnnnnnnnnnnnnnnnnnnnnnnnnnnnnnnnnnnnnnnnnnnnnnnnnnnnnnnnnnnnnnnnnnnnnnnnnnnnnnnnnnnnnnnnnnnnnnnnnnnnnnnnnnnnnnnnnnnnnnnnnnnnnnnnnnnnnnnnnnnnnnnnnnnnnnnnnnnnnnnnnnnnnnnnnnnnnnnnnnnnnnnnnnnnnnnnnnnnnnnnnnnnnnnnnnnnnnnnnnnnnnnnnnnnnnnnnnnnnnnnnnnnnnnnnnnnnnnnnnnnnnnnnnnnnnnnnnnnnnnnnnnnnnnnnnnnnnnnnnnnnnnnnnnnnnnnnnnnnnnnnnnnnnnnnnnnnnnnnnnnnnnnnnnnnnnnnnnnnnnnnnnnnnnnnnnnnnnnnnnnnnnnnnnnnnnnnnnnnnnnnnnnnnnnnnnnnnnnnnnnnnnnnnnnnnnnnnnnnnnnnnnnnnnnnnnnnnnnnnnnnnnnnnnnnnnnnnnnnnnnnnnnnnnnnnnnnnnnnnnnnnnnnnnnnnnnnnnnnnnnnnnnnnnnnnnnnnnnnnnnnnnnnnnnnnnnnnnnnnnnnnnnnnnnnnnnnnnnnnnnnnnnnnnnnnnnnnnnnnnnnnnnnnnnnnnnnnnnnnnnnnnnnnnnnnnnnnnnnnnnnnnnnnnnnnnnnnnnnnnnnnnnnnnnnnnnnnnnnnnnnnnnnnnnnnnnnnnnnnnnnnnnnnnnnnnnnnnnnnnnnnnnnnnnnnnnnnnnnnnnnnnnnnnnnnnnnnnnnnnnnnnnnnnnnnnnnnnnnnnnnnnnnnnnnnnnnnnnnnnnnnnnnnnnnnnnnnnnnnnnnnnnnnnnnnnnnnnnnnnnnnnnnnnnnnnnnnnnnnnnnnnnnnnnnnnnnnnnnnnnnnnnnnnnnnnnnnnnnnnnnnnnnnnnnnnnnnnnnnnnnnnnnnnnnnnnnnnnnnnnnnnnnnnnnnnnnnnnnnnnnnnnnnnnnnnnnnnnnnnnnnnnnnnnnnnnnnnnnnnnnnnnnnnnnnnnnnnnnnnnnnnnnnnnnnnnnnnnnnnnnnnnnnnnnnnnnnnnnnnnnnnnnnnnnnnnnnnnnnnnnnnnnnnnnnnnnnnnnnnnnnnnnnnnnnnnnnnnnnnnnnnnnnnnnnnnnnnnnnnnnnnnnnnnnnnnnnnnnnnnnnnnnnnnnnnnnnnnnnnnnnnnnnnnnnnnnnnnnnnnnnnnnnnnnnnnnnnnnnnnnnnnnnnnnnnnnnnnnnnnnnnnnnnnnnnnnnnnnnnnnnnnnnnnnnnnnnnnnnnnnnnnnnnnnnnnnnnnnnnnnnnnnnnnnnnnnnnnnnnnnnnnnnnnnnnnnnnnnnnnnnnnnnnnnnnnnnnnnnnnnnnnnnnnnnnnnnnnnnnnnnnnnnnnnnnnnnnnnnnnnnnnnnnnnnnnnnnnnnnnnnnnnnnnnnnnnnnnnnnnnnnnnnnnnnnnnnnnnnnnnnnnnnnnnnnnnnnnnnnnnnnnnnnnnnnnnnnnnnnnnnnnnnnnnnnnnnnnnnnnnnnnnnnnnnnnnnnnnnnnnnnnnnnnnnnnnnnnnnnnnnnnnnnnnnnnnnnnnnnnnnnnnnnnnnnnnnnnnnnnnnnnnnnnnnnnnnnnnnnnnnnnnnnnnnnnnnnnnnnnnnnnnnnnnnnnnnnnnnnnnnnnnnnnnnnnnnnnnnnnnnnnnnnnnnnnnnnnnnnnnnnnnnnnnnnnnnnnnnnnnnnnnnnnnnnnnnnnnnnnnnnnnnnnnnnnnnnnnnnnnnnnnnnnnnnnnnnnnnnnnnnnnnnnnnnnnnnnnnnnnnnnnnnnnnnnnnnnnnnnnnnnnnnnnnnnnnnnnnnnnnnnnnnnnnnnnnnnnnnnnnnnnnnnnnnnnnnnnnnnnnnnnnnnnnnnnnnnnnnnnnnnnnnnnnnnnnnnnnnnnnnnnnnnnnnnnnnnnnnnnnnnnnnnnnnnnnnnnnnnnnnnnnnnnnnnnnnnnnnnnnnnnnnnnnnnnnnnnnnnnnnnnnnnnnnnnnnnnnnnnnnnnnnnnnnnnnnnnnnnnnnnnnnnnnnnnnnnnnnnnnnnnnnnnnnnnnnnnnnnnnnnnnnnnnnnnnnnnnnnnnnnnnnnnnnnnnnnnnnnnnnnnnnnnnnnnnnnnnnnnnnnnnnnnnnnnnnnnnnnnnnnnnnnnnnnnnnnnnnnnnnnnnnnnnnnnnnnnnnnnnnnnnnnnnnnnnnnnnnnnnnnnnnnnnnnnnnnnnnnnnnnnnnnnnnnnnnnnnnnnnnnnnnnnnnnnnnnnnnnnnnnnnnnnnnnnnnnnnnnnnnnnnnnnnnnnnnnnnnnnnnnnnnnnnnnnnnnnnnnnnnnnnnnnnnnnnnnnnnnnnnnnnnnnnnnnnnnnnnnnnnnnnnnnnnnnnnnnnnnnnnnnnnnnnnnnnnnnnnnnnnnnnnnnnnnnnnnnnnnnnnnnnnnnnnnnnnnnnnnnnnnnnnnnnnnnnnnnnnnnnnnnnnnnnnnnnnnnnnnnnnnnnnnnnnnnnnnnnnnnnnnnnnnnnnnnnnnnnnnnnnnnnnnnnnnnnnnnnnnnnnnnnnnnnnnnnnnnnnnnnnnnnnnnnnnnnnnnnnnnnnnnnnnnnnnnnnnnnnnnnnnnnnnnnnnnnnnnnnnnnnnnnnnnnnnnnnnnnnnnnnnnnnnnnnnnnnnnnnnnnnnnnnnnnnnnnnnnnnnnnnnnnnnnnnnnnnnnnnnnnnnnnnnnnnnnnnnnnnnnnnnnnnnnnnnnnnnnnnnnnnnnnnnnnnnnnnnnnnnnnnnnnnnnnnnnnnnnnnnnnnnnnnnnnnnnnnnnnnnnnnnnnnnnnnnnnnnnnnnnnnnnnnnnnnnnnnnnnnnnnnnnnnnnnnnnnnnnnnnnnnnnnnnnnnnnnnnnnnnnnnnnnnnnnnnnnnnnnnnnnnnnnnnnnnnnnnnnnnnnnnnnnnnnnnnnnnnnnnnnnnnnnnnnnnnnnnnnnnnnnnnnnnnnnnnnnnnnnnnnnnnnnnnnnnnnnnnnnnnnnnnnnnnnnnnnnnnnnnnnnnnnnnnnnnnnnnnnnnnnnnnnnnnnnnnnnnnnnnnnnnnnnnnnnnnnnnnnnnnnnnnnnnnnnnnnnnnnnnnnnnnnnnnnnnnnnnnnnnnnnnnnnnnnnnnnnnnnnnnnnnnnnnnnnnnnnnnnnnnnnnnnnnnnnnnnnnnnnnnnnnnnnnnnnnnnnnnnnnnnnnnnnnnnnnnnnnnnnnnnnnnnnnnnnnnnnnnnnnnnnnnnnnnnnnnnnnnnnnnnnnnnnnnnnnnnnnnnnnnnnnnnnnnnnnnnnnnnnnnnnnnnnnnnnnnnnnnnnnnnnnnnnnnnnnnnnnnnnnnnnnnnnnnnnnnnnnnnnnnnnnnnnnnnnnnnnnnnnnnnnnnnnnnnnnnnnnnnnnnnnnnnnnnnnnnnnnnnnnnnnnnnnnnnnnnnnnnnnnnnnnnnnnnnnnnnnnnnnnnnnnnnnnnnnnnnnnnnnnnnnnnnnnnnnnnnnnnnnnnnnnnnnnnnnnnnnnnnnnnnnnnnnnnnnnnnnnnnnnnnnnnnnnnnnnnnnnnnnnnnnnnnnnnnnnnnnnnnnnnnnnnnnnnnnnnnnnnnnnnnnnnnnnnnnnnnnnnnnnnnnnnnnnnnnnnnnnnnnnnnnnnnnnnnnnnnnnnnnnnnnnnnnnnnnnnnnnnnnnnnnnnnnnnnnnnnnnnnnnnnnnnnnnnnnnnnnnnnnnnnnnnnnnnnnnnnnnnnnnnnnnnnnnnnnnnnnnnnnnnnnnnnnnnnnnnnnnnnnnnnnnnnnnnnnnnnnnnnnnnnnnnnnnnnnnnnnnnnnnnnnnnnnnnnnnnnnnnnnnnnnnnnnnnnnnnnnnnnnnnnnnnnnnnnnnnnnnnnnnnnnnnnnnnnnnnnnnnnnnnnnnnnnnnnnnnnnnnnnnnnnnnnnnnnnnnnnnnnnnnnnnnnnnnnnnnnnnnnnnnnnnnnnnnnnnnnnnnnnnnnnnnnnnnnnnnnnnnnnnnnnnnnnnnnnnnnnnnnnnnnnnnnnnnnnnnnnnnnnnnnnnnnnnnnnnnnnnnnnnnnnnnnnnnnnnnnnnnnnnnnnnnnnnnnnnnnnnnnnnnnnnnnnnnnnnnnnnnnnnnnnnnnnnnnnnnnnnnnnnnnnnnnnnnnnnnnnnnnnnnnnnnnnnnnnnnnnnnnnnnnnnnnnnnnnnnnnnnnnnnnnnnnnnnnnnnnnnnnnnnnnnnnnnnnnnnnnnnnnnnnnnnnnnnnnnnnnnnnnnnnnnnnnnnnnnnnnnnnnnnnnnnnnnnnnnnnnnnnnnnnnnnnnnnnnnnnnnnnnnnnnnnnnnnnnnnnnnnnnnnnnnnnnnnnnnnnnnnnnnnnnnnnnnnnnnnnnnnnnnnnnnnnnnnnnnnnnnnnnnnnnnnnnnnnnnnnnnnnnnnnnnnnnnnnnnnnnnnnnnnnnnnnnnnnnnnnnnnnnnnnnnnnnnnnnnnnnnnnnnnnnnnnnnnnnnnnnnnnnnnnnnnnnnnnnnnnnnnnnnnnnnnnnnnnnnnnnnnnnnnnnnnnnnnnnnnnnnnnnnnnnnnnnnnnnnnnnnnnnnnnnnnnnnnnnnnnnnnnnnnnnnnnnnnnnnnnnnnnnnnnnnnnnnnnnnnnnnnnnnnnnnnnnnnnnnnnnnnnnnnnnnnnnnnnnnnnnnnnnnnnnnnnnnnnnnnnnnnnnnnnnnnnnnnnnnnnnnnnnnnnnnnnnnnnnnnnnnnnnnnnnnnnnnnnnnnnnnnnnnnnnnnnnnnnnnnnnnnnnnnnnnnnnnnnnnnnnnnnnnnnnnnnnnnnnnnnnnnnnnnnnnnnnnnnnnnnnnnnnnnnnnnnnnnnnnnnnnnnnnnnnnnnnnnnnnnnnnnnnnnnnnnnnnnnnnnnnnnnnnnnnnnnnnnnnnnnnnnnnnnnnnnnnnnnnnnnnnnnnnnnnnnnnnnnnnnnnnnnnnnnnnnnnnnnnnnnnnnnnnnnnnnnnnnnnnnnnnnnnnnnnnnnnnnnnnnnnnnnnnnnnnnnnnnnnnnnnnnnnnnnnnnnnnnnnnnnnnnnnnnnnnnnnnnnnnnnnnnnnnnnnnnnnnnnnnnnnnnnnnnnnnnnnnnnnnnnnnnnnnnnnnnnnnnnnnnnnnnnnnnnnnnnnnnnnnnnnnnnnnnnnnnnnnnnnnnnnnnnnnnnnnnnnnnnnnnnnnnnnnnnnnnnnnnnnnnnnnnnnnnnnnnnnnnnnnnnnnnnnnnnnnnnnnnnnnnnnnnnnnnnnnnnnnnnnnnnnnnnnnnnnnnnnnnnnnnnnnnnnnnnnnnnnnnnnnnnnnnnnnnnnnnnnnnnnnnnnnnnnnnnnnnnnnnnnnnnnnnnnnnnnnnnnnnnnnnnnnnnnnnnnnnnnnnnnnnnnnnnnnnnnnnnnnnnnnnnnnnnnnnnnnnnnnnnnnnnnnnnnnnnnnnnnnnnnnnnnnnnnnnnnnnnnnnnnnnnnnnnnnnnnnnnnnnnnnnnnnnnnnnnnnnnnnnnnnnnnnnnnnnnnnnnnnnnnnnnnnnnnnnnnnnnnnnnnnnnnnnnnnnnnnnnnnnnnnnnnnnnnnnnnnnnnnnnnnnnnnnnnnnnnnnnnnnnnnnnnnnnnnnnnnnnnnnnnnnnnnnnnnnnnnnnnnnnnnnnnnnnnnnnnnnnnnnnnnnnnnnnnnnnnnnnnnnnnnnnnnnnnnnnnnnnnnnnnnnnnnnnnnnnnnnnnnnnnnnnnnnnnnnnnnnnnnnnnnnnnnnnnnnnnnnnnnnnnnnnnnnnnnnnnnnnnnnnnnnnnnnnnnnnnnnnnnnnnnnnnnnnnnnnnnnnnnnnnnnnnnnnnnnnnnnnnnnnnnnnnnnnnnnnnnnnnnnnnnnnnnnnnnnnnnnnnnnnnnnnnnnnnnnnnnnnnnnnnnnnnnnnnnnnnnnnnnnnnnnnnnnnnnnnnnnnnnnnnnnnnnnnnnnnnnnnnnnnnnnnnnnnnnnnnnnnnnnnnnnnnnnnnnnnnnnnnnnnnnnnnnnnnnnnnnnnnnnnnnnnnnnnnnnnnnnnnnnnnnnnnnnnnnnnnnnnnnnnnnnnnnnnnnnnnnnnnnnnnnnnnnnnnnnnnnnnnnnnnnnnnnnnnnnnnnnnnnnnnnnnnnnnnnnnnnnnnnnnnnnnnnnnnnnnnnnnnnnnnnnnnnnnnnnnnnnnnnnnnnnnnnnnnnnnnnnnnnnnnnnnnnnnnnnnnnnnnnnnnnnnnnnnnnnnnnnnnnnnnnnnnnnnnnnnnnnnnnnnnnnnnnnnnnnnnnnnnnnnnnnnnnnnnnnnnnnnnnnnnnnnnnnnnnnnnnnnnnnnnnnnnnnnnnnnnnnnnnnnnnnnnnnnnnnnnnnnnnnnnnnnnnnnnnnnnnnnnnnnnnnnnnnnnnnnnnnnnnnnnnnnnnnnnnnnnnnnnnnnnnnnnnnnnnnnnnnnnnnnnnnnnnnnnnnnnnnnnnnnnnnnnnnnnnnnnnnnnnnnnnnnnnnnnnnnnnnnnnnnnnnnnnnnnnnnnnnnnnnnnnnnnnnnnnnnnnnnnnnnnnnnnnnnnnnnnnnnnnnnnnnnnnnnnnnnnnnnnnnnnnnnnnnnnnnnnnnnnnnnnnnnnnnnnnnnnnnnnnnnnnnnnnnnnnnnnnnnnnnnnnnnnnnnnnnnnnnnnnnnnnnnnnnnnnnnnnnnnnnnnnnnnnnnnnnnnnnnnnnnnnnnnnnnnnnnnnnnnnnnnnnnnnnnnnnnnnnnnnnnnnnnnnnnnnnnnnnnnnnnnnnnnnnnnnnnnnnnnnnnnnnnnnnnnnnnnnnnnnnnnnnnnnnnnnnnnnnnnnnnnnnnnnnnnnnnnnnnnnnnnnnnnnnnnnnnnnnnnnnnnnnnnnnnnnnnnnnnnnnnnnnnnnnnnnnnnnnnnnnnnnnnnnnnnnnnnnnnnnnnnnnnnnnnnnnnnnnnnnnnnnnnnnnnnnnnnnnnnnnnnnnnnnnnnnnnnnnnnnnnnnnnnnnnnnnnnnnnnnnnnnnnnnnnnnnnnnnnnnnnnnnnnnnnnnnnnnnnnnnnnnnnnnnnnnnnnnnnnnnnnnnnnnnnnnnnnnnnnnnnnnnnnnnnnnnnnnnnnnnnnnnnnnnnnnnnnnnnnnnnnnnnnnnnnnnnnnnnnnnnnnnnnnnnnnnnnnnnnnnnnnnnnnnnnnnnnnnnnnnnnnnnnnnnnnnnnnnnnnnnnnnnnnnnnnnnnnnnnnnnnnnnnnnnnnnnnnnnnnnnnnnnnnnnnnnnnnnnnnnnnnnnnnnnnnnnnnnnnnnnnnnnnnnnnnnnnnnnnnnnnnnnnnnnnnnnnnnnnnnnnnnnnnnnnnnnnnnnnnnnnnnnnnnnnnnnnnnnnnnnnnnnnnnnnnnnnnnnnnnnnnnnnnnnnnnnnnnnnnnnnnnnnnnnnnnnnnnnnnnnnnnnnnnnnnnnnnnnnnnnnnnnnnnnnnnnnnnnnnnnnnnnnnnnnnnnnnnnnnnnnnnnnnnnnnnnnnnnnnnnnnnnnnnnnnnnnnnnnnnnnnnnnnnnnnnnnnnnnnnnnnnnnnnnnnnnnnnnnnnnnnnnnnnnnnnnnnnnnnnnnnnnnnnnnnnnnnnnnnnnnnnnnnnnnnnnnnnnnnnnnnnnnnnnnnnnnnnnnnnnnnnnnnnnnnnnnnnnnnnnnnnnnnnnnnnnnnnnnnnnnnnnnnnnnnnnnnnnnnnnnnnnnnnnnnnnnnnnnnnnnnnnnnnnnnnnnnnnnnnnnnnnnnnnnnnnnnnnnnnnnnnnnnnnnnnnnnnnnnnnnnnnnnnnnnnnnnnnnnnnnnnnnnnnnnnnnnnnnnnnnnnnnnnnnnnnnnnnnnnnnnnnnnnnnnnnnnnnnnnnnnnnnnnnnnnnnnnnnnnnnnnnnnnnnnnnnnnnnnnnnnnnnnnnnnnnnnnnnnnnnnnnnnnnnnnnnnnnnnnnnnnnnnnnnnnnnnnnnnnnnnnnnnnnnnnnnnnnnnnnnnnnnnnnnnnnnnnnnnnnnnnnnnnnnnnnnnnnnnnnnnnnnnnnnnnnnnnnnnnnnnnnnnnnnnnnnnnnnnnnnnnnnnnnnnnnnnnnnnnnnnnnnnnnnnnnnnnnnnnnnnnnnnnnnnnnnnnnnnnnnnnnnnnnnnnnnnnnnnnnnnnnnnnnnnnnnnnnnnnnnnnnnnnnnnnnnnnnnnnnnnnnnnnnnnnnnnnnnnnnnnnnnnnnnnnnnnnnnnnnnnnnnnnnnnnnnnnnnnnnnnnnnnnnnnnnnnnnnnnnnnnnnnnnnnnnnnnnnnnnnnnnnnnnnnnnnnnnnnnnnnnnnnnnnnnnnnnnnnnnnnnnnnnnnnnnnnnnnnnnnnnnnnnnnnnnnnnnnnnnnnnnnnnnnnnnnnnnnnnnnnnnnnnnnnnnnnnnnnnnnnnnnnnnnnnnnnnnnnnnnnnnnnnnnnnnnnnnnnnnnnnnnnnnnnnnnnnnnnnnnnnnnnnnnnnnnnnnnnnnnnnnnnnnnnnnnnnnnnnnnnnnnnnnnnnnnnnnnnnnnnnnnnnnnnnnnnnnnnnnnnnnnnnnnnnnnnnnnnnnnnnnnnnnnnnnnnnnnnnnnnnnnnnnnnnnnnnnnnnnnnnnnnnnnnnnnnnnnnnnnnnnnnnnnnnnnnnnnnnnnnnnnnnnnnnnnnnnnnnnnnnnnnnnnnnnnnnnnnnnnnnnnnnnnnnnnnnnnnnnnnnnnnnnnnnnnnnnnnnnnnnnnnnnnnnnnnnnnnnnnnnnnnnnnnnnnnnnnnnnnnnnnnnnnnnnnnnnnnnnnnnnnnnnnnnnnnnnnnnnnnnnnnnnnnnnnnnnnnnnnnnnnnnnnnnnnnnnnnnnnnnnnnnnnnnnnnnnnnnnnnnnnnnnnnnnnnnnnnnnnnnnnnnnnnnnnnnnnnnnnnnnnnnnnnnnnnnnnnnnnnnnnnnnnnnnnnnnnnnnnnnnnnnnnnnnnnnnnnnnnnnnnnnnnnnnnnnnnnnnnnnnnnnnnnnnnnnnnnnnnnnnnnnnnnnnnnnnnnnnnnnnnnnnnnnnnnnnnnnnnnnnnnnnnnnnnnnnnnnnnnnnnnnnnnnnnnnnnnnnnnnnnnnnnnnnnnnnnnnnnnnnnnnnnnnnnnnnnnnnnnnnnnnnnnnnnnnnnnnnnnnnnnnnnnnnnnnnnnnnnnnnnnnnnnnnnnnnnnnnnnnnnnnnnnnnnnnnnnnnnnnnnnnnnnnnnnnnnnnnnnnnnnnnnnnnnnnnnnnnnnnnnnnnnnnnnnnnnnnnnnnnnnnnnnnnnnnnnnnnnnnnnnnnnnnnnnnnnnnnnnnnnnnnnnnnnnnnnnnnnnnnnnnnnnnnnnnnnnnnnnnnnnnnnnnnnnnnnnnnnnnnnnnnnnnnnnnnnnnnnnnnnnnnnnnnnnnnnnnnnnnnnnnnnnnnnnnnnnnnnnnnnnnnnnnnnnnnnnnnnnnnnnnnnnnnnnnnnnnnnnnnnnnnnnnnnnnnnnnnnnnnnnnnnnnnnnnnnnnnnnnnnnnnnnnnnnnnnnnnnnnnnnnnnnnnnnnnnnnnnnnnnnnnnnnnnnnnnnnnnnnnnnnnnnnnnnnnnnnnnnnnnnnnnnnnnnnnnnnnnnnnnnnnnnnnnnnnnnnnnnnnnnnnnnnnnnnnnnnnnnnnnnnnnnnnnnnnnnnnnnnnnnnnnnnnnnnnnnnnnnnnnnnnnnnnnnnnnnnnnnnnnnnnnnnnnnnnnnnnnnnnnnnnnnnnnnnnnnnnnnnnnnnnnnnnnnnnnnnnnnnnnnnnnnnnnnnnnnnnnnnnnnnnnnnnnnnnnnnnnnnnnnnnnnnnnnnnnnnnnnnnnnnnnnnnnnnnnnnnnnnnnnnnnnnnnnnnnnnnnnnnnnnnnnnnnnnnnnnnnnnnnnnnnnnnnnnnnnnnnnnnnnnnnnnnnnnnnnnnnnnnnnnnnnnnnnnnnnnnnnnnnnnnnnnnnnnnnnnnnnnnnnnnnnnnnnnnnnnnnnnnnnnnnnnnnnnnnnnnnnnnnnnnnnnnnnnnnnnnnnnnnnnnnnnnnnnnnnnnnnnnnnnnnnnnnnnnnnnnnnnnnnnnnnnnnnnnnnnnnnnnnnnnnnnnnnnnnnnnnnnnnnnnnnnnnnnnnnnnnnnnnnnnnnnnnnnnnnnnnnnnnnnnnnnnnnnnnnnnnnnnnnnnnnnnnnnnnnnnnnnnnnnnnnnnnnnnnnnnnnnnnnnnnnnnnnnnnnnnnnnnnnnnnnnnnnnnnnnnnnnnnnnnnnnnnnnnnnnnnnnnnnnnnnnnnnnnnnnnnnnnnnnnnnnnnnnnnnnnnnnnnnnnnnnnnnnnnnnnnnnnnnnnnnnnnnnnnnnnnnnnnnnnnnnnnnnnnnnnnnnnnnnnnnnnnnnnnnnnnnnnnnnnnnnnnnnnnnnnnnnnnnnnnnnnnnnnnnnnnnnnnnnnnnnnnnnnnnnnnnnnnnnnnnnnnnnnnnnnnnnnnnnnnnnnnnnnnnnnnnnnnnnnnnnnnnnnnnnnnnnnnnnnnnnnnnnnnnnnnnnnnnnnnnnnnnnnnnnnnnnnnnnnnnnnnnnnnnnnnnnnnnnnnnnnnnnnnnnnnnnnnnnnnnnnnnnnnnnnnnnnnnnnnnnnnnnnnnnnnnnnnnnnnnnnnnnnnnnnnnnnnnnnnnnnnnnnnnnnnnnnnnnnnnnnnnnnnnnnnnnnnnnnnnnnnnnnnnnnnnnnnnnnnnnnnnnnnnnnnnnnnnnnnnnnnnnnnnnnnnnnnnnnnnnnnnnnnnnnnnnnnnnnnnnnnnnnnnnnnnnnnnnnnnnnnnnnnnnnnnnnnnnnnnnnnnnnnnnnnnnnnnnnnnnnnnnnnnnnnnnnnnnnnnnnnnnnnnnnnnnnnnnnnnnnnnnnnnnnnnnnnnnnnnnnnnnnnnnnnnnnnnnnnnnnnnnnnnnnnnnnnnnnnnnnnnnnnnnnnnnnnnnnnnnnnnnnnnnnnnnnnnnnnnnnnnnnnnnnnnnnnnnnnnnnnnnnnnnnnnnnnnnnnnnnnnnnnnnnnnnnnnnnnnnnnnnnnnnnnnnnnnnnnnnnnnnnnnnnnnnnnnnnnnnnnnnnnnnnnnnnnnnnnnnnnnnnnnnnnnnnnnnnnnnnnnnnnnnnnnnnnnnnnnnnnnnnnnnnnnnnnnnnnnnnnnnnnnnnnnnnnnnnnnnnnnnnnnnnnnnnnnnnnnnnnnnnnnnnnnnnnnnnnnnnnnnnnnnnnnnnnnnnnnnnnnnnnnnnnnnnnnnnnnnnnnnnnnnnnnnnnnnnnnnnnnnnnnnnnnnnnnnnnnnnnnnnnnnnnnnnnnnnnnnnnnnnnnnnnnnnnnnnnnnnnnnnnnnnnnnnnnnnnnnnnnnnnnnnnnnnnnnnnnnnnnnnnnnnnnnnnnnnnnnnnnnnnnnnnnnnnnnnnnnnnnnnnnnnnnnnnnnnnnnnnnnnnnnnnnnnnnnnnnnnnnnnnnnnnnnnnnnnnnnnnnnnnnnnnnnnnnnnnnnnnnnnnnnnnnnnnnnnnnnnnnnnnnnnnnnnnnnnnnnnnnnnnnnnnnnnnnnnnnnnnnnnnnnnnnnnnnnnnnnnnnnnnnnnnnnnnnnnnnnnnnnnnnnnnnnnnnnnnnnnnnnnnnnnnnnnnnnnnnnnnnnnnnnnnnnnnnnnnnnnnnnnnnnnnnnnnnnnnnnnnnnnnnnnnnnnnnnnnnnnnnnnnnnnnnnnnnnnnnnnnnnnnnnnnnnnnnnnnnnnnnnnnnnnnnnnnnnnnnnnnnnnnnnnnnnnnnnnnnnnnnnnnnnnnnnnnnnnnnnnnnnnnnnnnnnnnnnnnnnnnnnnnnnnnnnnnnnnnnnnnnnnnnnnnnnnnnnnnnnnnnnnnnnnnnnnnnnnnnnnnnnnnnnnnnnnnnnnnnnnnnnnnnnnnnnnnnnnnnnnnnnnnnnnnnnnnnnnnnnnnnnnnnnnnnnnnnnnnnnnnnnnnnnnnnnnnnnnnnnnnnnnnnnnnnnnnnnnnnnnnnnnnnnnnnnnnnnnnnnnnnnnnnnnnnnnnnnnnnnnnnnnnnnnnnnnnnnnnnnnnnnnnnnnnnnnnnnnnnnnnnnnnnnnnnnnnnnnnnnnnnnnnnnnnnnnnnnnnnnnnnnnnnnnnnnnnnnnnnnnnnnnnnnnnnnnnnnnnnnnnnnnnnnnnnnnnnnnnnnnnnnnnnnnnnnnnnnnnnnnnnnnnnnnnnnnnnnnnnnnnnnnnnnnnnnnnnnnnnnnnnnnnnnnnnnnnnnnnnnnnnnnnnnnnnnnnnnnnnnnnnnnnnnnnnnnnnnnnnnnnnnnnnnnnnnnnnnnnnnnnnnnnnnnnnnnnnnnnnnnnnnnnnnnnnnnnnnnnnnnnnnnnnnnnnnnnnnnnnnnnnnnnnnnnnnnnnnnnnnnnnnnnnnnnnnnnnnnnnnnnnnnnnnnnnnnnnnnnnnnnnnnnnnnnnnnnnnnnnnnnnnnnnnnnnnnnnnnnnnnnnnnnnnnnnnnnnnnnnnnnnnnnnnnnnnnnnnnnnnnnnnnnnnnnnnnnnnnnnnnnnnnnnnnnnnnnnnnnnnnnnnnnnnnnnnnnnnnnnnnnnnnnnnnnnnnnnnnnnnnnnnnnnnnnnnnnnnnnnnnnnnnnnnnnnnnnnnnnnnnnnnnnnnnnnnnnnnnnnnnnnnnnnnnnnnnnnnnnnnnnnnnnnnnnnnnnnnnnnnnnnnnnnnnnnnnnnnnnnnnnnnnnnnnnnnnnnnnnnnnnnnnnnnnnnnnnnnnnnnnnnnnnnnnnnnnnnnnnnnnnnnnnnnnnnnnnnnnnnnnnnnnnnnnnnnnnnnnnnnnnnnnnnnnnnnnnnnnnnnnnnnnnnnnnnnnnnnnnnnnnnnnnnnnnnnnnnnnnnnnnnnnnnnnnnnnnnnnnnnnnnnnnnnnnnnnnnnnnnnnnnnnnnnnnnnnnnnnnnnnnnnnnnnnnnnnnnnnnnnnnnnnnnnnnnnnnnnnnnnnnnnnnnnnnnnnnnnnnnnnnnnnnnnnnnnnnnnnnnnnnnnnnnnnnnnnnnnnnnnnnnnnnnnnnnnnnnnnnnnnnnnnnnnnnnnnnnnnnnnnnnnnnnnnnnnnnnnnnnnnnnnnnnnnnnnnnnnnnnnnnnnnnnnnnnnnnnnnnnnnnnnnnnnnnnnnnnnnnnnnnnnnnnnnnnnnnnnnnnnnnnnnnnnnnnnnnnnnnnnnnnnnnnnnnnnnnnnnnnnnnnnnnnnnnnnnnnnnnnnnnnnnnnnnnnnnnnnnnnnnnnnnnnnnnnnnnnnnnnnnnnnnnnnnnnnnnnnnnnnnnnnnnnnnnnnnnnnnnnnnnnnnnnnnnnnnnnnnnnnnnnnnnnnnnnnnnnnnnnnnnnnnnnnnnnnnnnnnnnnnnnnnnnnnnnnnnnnnnnnnnnnnnnnnnnnnnnnnnnnnnnnnnnnnnnnnnnnnnnnnnnnnnnnnnnnnnnnnnnnnnnnnnnnnnnnnnnnnnnnnnnnnnnnnnnnnnnnnnnnnnnnnnnnnnnnnnnnnnnnnnnnnnnnnnnnnnnnnnnnnnnnnnnnnnnnnnnnnnnnnnnnnnnnnnnnnnnnnnnnnnnnnnnnnnnnnnnnnnnnnnnnnnnnnnnnnnnnnnnnnnnnnnnnnnnnnnnnnnnnnnnnnnnnnnnnnnnnnnnnnnnnnnnnnnnnnnnnnnnnnnnnnnnnnnnnnnnnnnnnnnnnnnnnnnnnnnnnnnnnnnnnnnnnnnnnnnnnnnnnnnnnnnnnnnnnnnnnnnnnnnnnnnnnnnnnnnnnnnnnnnnnnnnnnnnnnnnnnnnnnnnnnnnnnnnnnnnnnnnnnnnnnnnnnnnnnnnnnnnnnnnnnnnnnnnnnnnnnnnnnnnnnnnnnnnnnnnnnnnnnnnnnnnnnnnnnnnnnnnnnnnnnnnnnnnnnnnnnnnnnnnnnnnnnnnnnnnnnnnnnnnnnnnnnnnnnnnnnnnnnnnnnnnnnnnnnnnnnnnnnnnnnnnnnnnnnnnnnnnnnnnnnnnnnnnnnnnnnnnnnnnnnnnnnnnnnnnnnnnnnnnnnnnnnnnnnnnnnnnnnnnnnnnnnnnnnnnnnnnnnnnnnnnnnnnnnnnnnnnnnnnnnnnnnnnnnnnnnnnnnnnnnnnnnnnnnnnnnnnnnnnnnnnnnnnnnnnnnnnnnnnnnnnnnnnnnnnnnnnnnnnnnnnnnnnnnnnnnnnnnnnnnnnnnnnnnnnnnnnnnnnnnnnnnnnnnnnnnnnnnnnnnnnnnnnnnnnnnnnnnnnnnnnnnnnnnnnnnnnnnnnnnnnnnnnnnnnnnnnnnnnnnnnnnnnnnnnnnnnnnnnnnnnnnnnnnnnnnnnnnnnnnnnnnnnnnnnnnnnnnnnnnnnnnnnnnnnnnnnnnnnnnnnnnnnnnnnnnnnnnnnnnnnnnnnnnnnnnnnnnnnnnnnnnnnnnnnnnnnnnnnnnnnnnnnnnnnnnnnnnnnnnnnnnnnnnnnnnnnnnnnnnnnnnnnnnnnnnnnnnnnnnnnnnnnnnnnnnnnnnnnnnnnnnnnnnnnnnnnnnnnnnnnnnnnnnnnnnnnnnnnnnnnnnnnnnnnnnnnnnnnnnnnnnnnnnnnnnnnnnnnnnnnnnnnnnnnnnnnnnnnnnnnnnnnnnnnnnnnnnnnnnnnnnnnnnnnnnnnnnnnnnnnnnnnnnnnnnnnnnnnnnnnnnnnnnnnnnnnnnnnnnnnnnnnnnnnnnnnnnnnnnnnnnnnnnnnnnnnnnnnnnnnnnnnnnnnnnnnnnnnnnnnnnnnnnnnnnnnnnnnnnnnnnnnnnnnnnnnnnnnnnnnnnnnnnnnnnnnnnnnnnnnnnnnnnnnnnnnnnnnnnnnnnnnnnnnnnnnnnnnnnnnnnnnnnnnnnnnnnnnnnnnnnnnnnnnnnnnnnnnnnnnnnnnnnnnnnnnnnnnnnnnnnnnnnnnnnnnnnnnnnnnnnnnnnnnnnnnnnnnnnnnnnnnnnnnnnnnnnnnnnnnnnnnnnnnnnnnnnnnnnnnnnnnnnnnnnnnnnnnnnnnnnnnnnnnnnnnnnnnnnnnnnnnnnnnnnnnnnnnnnnnnnnnnnnnnnnnnnnnnnnnnnnnnnnnnnnnnnnnnnnnnnnnnnnnnnnnnnnnnnnnnnnnnnnnnnnnnnnnnnnnnnnnnnnnnnnnnnnnnnnnnnnnnnnnnnnnnnnnnnnnnnnnnnnnnnnnnnnnnnnnnnnnnnnnnnnnnnnnnnnnnnnnnnnnnnnnnnnnnnnnnnnnnnnnnnnnnnnnnnnnnnnnnnnnnnnnnnnnnnnnnnnnnnnnnnnnnnnnnnnnnnnnnnnnnnnnnnnnnnnnnnnnnnnnnnnnnnnnnnnnnnnnnnnnnnnnnnnnnnnnnnnnnnnnnnnnnnnnnnnnnnnnnnnnnnnnnnnnnnnnnnnnnnnnnnnnnnnnnnnnnnnnnnnnnnnnnnnnnnnnnnnnnnnnnnnnnnnnnnnnnnnnnnnnnnnnnnnnnnnnnnnnnnnnnnnnnnnnnnnnnnnnnnnnnnnnnnnnnnnnnnnnnnnnnnnnnnnnnnnnnnnnnnnnnnnnnnnnnnnnnnnnnnnnnnnnnnnnnnnnnnnnnnnnnnnnnnnnnnnnnnnnnnnnnnnnnnnnnnnnnnnnnnnnnnnnnnnnnnnnnnnnnnnnnnnnnnnnnnnnnnnnnnnnnnnnnnnnnnnnnnnnnnnnnnnnnnnnnnnnnnnnnnnnnnnnnnnnnnnnnnnnnnnnnnnnnnnnnnnnnnnnnnnnnnnnnnnnnnnnnnnnnnnnnnnnnnnnnnnnnnnnnnnnnnnnnnnnnnnnnnnnnnnnnnnnnnnnnnnnnnnnnnnnnnnnnnnnnnnnnnnnnnnnnnnnnnnnnnnnnnnnnnnnnnnnnnnnnnnnnnnnnnnnnnnnnnnnnnnnnnnnnnnnnnnnnnnnnnnnnnnnnnnnnnnnnnnnnnnnnnnnnnnnnnnnnnnnnnnnnnnnnnnnnnnnnnnnnnnnnnnnnnnnnnnnnnnnnnnnnnnnnnnnnnnnnnnnnnnnnnnnnnnnnnnnnnnnnnnnnnnnnnnnnnnnnnnnnnnnnnnnnnnnnnnnnnnnnnnnnnnnnnnnnnnnnnnnnnnnnnnnnnnnnnnnnnnnnnnnnnnnnnnnnnnnnnnnnnnnnnnnnnnnnnnnnnnnnnnnnnnnnnnnnnnnnnnnnnnnnnnnnnnnnnnnnnnnnnnnnnnnnnnnnnnnnnnnnnnnnnnnnnnnnnnnnnnnnnnnnnnnnnnnnnnnnnnnnnnnnnnnnnnnnnnnnnnnnnnnnnnnnnnnnnnnnnnnnnnnnnnnnnnnnnnnnnnnnnnnnnnnnnnnnnnnnnnnnnnnnnnnnnnnnnnnnnnnnnnnnnnnnnnnnnnnnnnnnnnnnnnnnnnnnnnnnnnnnnnnnnnnnnnnnnnnnnnnnnnnnnnnnnnnnnnnnnnnnnnnnnnnnnnnnnnnnnnnnnnnnnnnnnnnnnnnnnnnnnnnnnnnnnnnnnnnnnnnnnnnnnnnnnnnnnnnnnnnnnnnnnnnnnnnnnnnnnnnnnnnnnnnnnnnnnnnnnnnnnnnnnnnnnnnnnnnnnnnnnnnnnnnnnnnnnnnnnnnnnnnnnnnnnnnnnnnnnnnnnnnnnnnnnnnnnnnnnnnnnnnnnnnnnnnnnnnnnnnnnnnnnnnnnnnnnnnnnnnnnnnnnnnnnnnnnnnnnnnnnnnnnnnnnnnnnnnnnnnnnnnnnnnnnnnnnnnnnnnnnnnnnnnnnnnnnnnnnnnnnnnnnnnnnnnnnnnnnnnnnnnnnnnnnnnnnnnnnnnnnnnnnnnnnnnnnnnnnnnnnnnnnnnnnnnnnnnnnnnnnnnnnnnnnnnnnnnnnnnnnnnnnnnnnnnnnnnnnnnnnnnnnnnnnnnnnnnnnnnnnnnnnnnnnnnnnnnnnnnnnnnnnnnnnnnnnnnnnnnnnnnnnnnnnnnnnnnnnnnnnnnnnnnnnnnnnnnnnnnnnnnnnnnnnnnnnnnnnnnnnnnnnnnnnnnnnnnnnnnnnnnnnnnnnnnnnnnnnnnnnnnnnnnnnnnnnnnnnnnnnnnnnnnnnnnnnnnnnnnnnnnnnnnnnnnnnnnnnnnnnnnnnnnnnnnnnnnnnnnnnnnnnnnnnnnnnnnnnnnnnnnnnnnnnnnnnnnnnnnnnnnnnnnnnnnnnnnnnnnnnnnnnnnnnnnnnnnnnnnnnnnnnnnnnnnnnnnnnnnnnnnnnnnnnnnnnnnnnnnnnnnnnnnnnnnnnnnnnnnnnnnnnnnnnnnnnnnnnnnnnnnnnnnnnnnnnnnnnnnnnnnnnnnnnnnnnnnnnnnnnnnnnnnnnnnnnnnnnnnnnnnnnnnnnnnnnnnnnnnnnnnnnnnnnnnnnnnnnnnnnnnnnnnnnnnnnnnnnnnnnnnnnnnnnnnnnnnnnnnnnnnnnnnnnnnnnnnnnnnnnnnnnnnnnnnnnnnnnnnnnnnnnnnnnnnnnnnnnnnnnnnnnnnnnnnnnnnnnnnnnnnnnnnnnnnnnnnnnnnnnnnnnnnnnnnnnnnnnnnnnnnnnnnnnnnnnnnnnnnnnnnnnnnnnnnnnnnnnnnnnnnnnnnnnnnnnnnnnnnnnnnnnnnnnnnnnnnnnnnnnnnnnnnnnnnnnnnnnnnnnnnnnnnnnnnnnnnnnnnnnnnnnnnnnnnnnnnnnnnnnnnnnnnnnnnnnnnnnnnnnnnnnnnnnnnnnnnnnnnnnnnnnnnnnnnnnnnnnnnnnnnnnnnnnnnnnnnnnnnnnnnnnnnnnnnnnnnnnnnnnnnnnnnnnnnnnnnnnnnnnnnnnnnnnnnnnnnnnnnnnnnnnnnnnnnnnnnnnnnnnnnnnnnnnnnnnnnnnnnnnnnnnnnnnnnnnnnnnnnnnnnnnnnnnnnnnnnnnnnnnnnnnnnnnnnnnnnnnnnnnnnnnnnnnnnnnnnnnnnnnnnnnnnnnnnnnnnnnnnnnnnnnnnnnnnnnnnnnnnnnnnnnnnnnnnnnnnnnnnnnnnnnnnnnnnnnnnnnnnnnnnnnnnnnnnnnnnnnnnnnnnnnnnnnnnnnnnnnnnnnnnnnnnnnnnnnnnnnnnnnnnnnnnnnnnnnnnnnnnnnnnnnnnnnnnnnnnnnnnnnnnnnnnnnnnnnnnnnnnnnnnnnnnnnnnnnnnnnnnnnnnnnnnnnnnnnnnnnnnnnnnnnnnnnnnnnnnnnnnnnnnnnnnnnnnnnnnnnnnnnnnnnnnnnnnnnnnnnnnnnnnnnnnnnnnnnnnnnnnnnnnnnnnnnnnnnnnnnnnnnnnnnnnnnnnnnnnnnnnnnnnnnnnnnnnnnnnnnnnnnnnnnnnnnnnnnnnnnnnnnnnnnnnnnnnnnnnnnnnnnnnnnnnnnnnnnnnnnnnnnnnnnnnnnnnnnnnnnnnnnnnnnnnnnnnnnnnnnnnnnnnnnnnnnnnnnnnnnnnnnnnnnnnnnnnnnnnnnnnnnnnnnnnnnnnnnnnnnnnnnnnnnnnnnnnnnnnnnnnnnnnnnnnnnnnnnnnnnnnnnnnnnnnnnnnnnnnnnnnnnnnnnnnnnnnnnnnnnnnnnnnnnnnnnnnnnnnnnnnnnnnnnnnnnnnnnnnnnnnnnnnnnnnnnnnnnnnnnnnnnnnnnnnnnnnnnnnnnnnnnnnnnnnnnnnnnnnnnnnnnnnnnnnnnnnnnnnnnnnnnnnnnnnnnnnnnnnnnnnnnnnnnnnnnnnnnnnnnnnnnnnnnnnnnnnnnnnnnnnnnnnnnnnnnnnnnnnnnnnnnnnnnnnnnnnnnnnnnnnnnnnnnnnnnnnnnnnnnnnnnnnnnnnnnnnnnnnnnnnnnnnnnnnnnnnnnnnnnnnnnnnnnnnnnnnnnnnnnnnnnnnnnnnnnnnnnnnnnnnnnnnnnnnnnnnnnnnnnnnnnnnnnnnnnnnnnnnnnnnnnnnnnnnnnnnnnnnnnnnnnnnnnnnnnnnnnnnnnnnnnnnnnnnnnnnnnnnnnnnnnnnnnnnnnnnnnnnnnnnnnnnnnnnnnnnnnnnnnnnnnnnnnnnnnnnnnnnnnnnnnnnnnnnnnnnnnnnnnnnnnnnnnnnnnnnnnnnnnnnnnnnnnnnnnnnnnnnnnnnnnnnnnnnnnnnnnnnnnnnnnnnnnnnnnnnnnnnnnnnnnnnnnnnnnnnnnnnnnnnnnnnnnnnnnnnnnnnnnnnnnnnnnnnnnnnnnnnnnnnnnnnnnnnnnnnnnnnnnnnnnnnnnnnnnnnnnnnnnnnnnnnnnnnnnnnnnnnnnnnnnnnnnnnnnnnnnnnnnnnnnnnnnnnnnnnnnnnnnnnnnnnnnnnnnnnnnnnnnnnnnnnnnnnnnnnnnnnnnnnnnnnnnnnnnnnnnnnnnnnnnnnnnnnnnnnnnnnnnnnnnnnnnnnnnnnnnnnnnnnnnnnnnnnnnnnnnnnnnnnnnnnnnnnnnnnnnnnnnnnnnnnnnnnnnnnnnnnnnnnnnnnnnnnnnnnnnnnnnnnnnnnnnnnnnnnnnnnnnnnnnnnnnnnnnnnnnnnnnnnnnnnnnnnnnnnnnnnnnnnnnnnnnnnnnnnnnnnnnnnnnnnnnnnnnnnnnnnnnnnnnnnnnnnnnnnnnnnnnnnnnnnnnnnnnnnnnnnnnnnnnnnnnnnnnnnnnnnnnnnnnnnnnnnnnnnnnnnnnnnnnnnnnnnnnnnnnnnnnnnnnnnnnnnnnnnnnnnnnnnnnnnnnnnnnnnnnnnnnnnnnnnnnnnnnnnnnnnnnnnnnnnnnnnnnnnnnnnnnnnnnnnnnnnnnnnnnnnnnnnnnnnnnnnnnnnnnnnnnnnnnnnnnnnnnnnnnnnnnnnnnnnnnnnnnnnnnnnnnnnnnnnnnnnnnnnnnnnnnnnnnnnnnnnnnnnnnnnnnnnnnnnnnnnnnnnnnnnnnnnnnnnnnnnnnnnnnnnnnnnnnnnnnnnnnnnnnnnnnnnnnnnnnnnnnnnnnnnnnnnnnnnnnnnnnnnnnnnnnnnnnnnnnnnnnnnnnnnnnnnnnnnnnnnnnnnnnnnnnnnnnnnnnnnnnnnnnnnnnnnnnnnnnnnnnnnnnnnnnnnnnnnnnnnnnnnnnnnnnnnnnnnnnnnnnnnnnnnnnnnnnnnnnnnnnnnnnnnnnnnnnnnnnnnnnnnnnnnnnnnnnnnnnnnnnnnnnnnnnnnnnnnnnnnnnnnnnnnnnnnnnnnnnnnnnnnnnnnnnnnnnnnnnnnnnnnnnnnnnnnnnnnnnnnnnnnnnnnnnnnnnnnnnnnnnnnnnnnnnnnnnnnnnnnnnnnnnnnnnnnnnnnnnnnnnnnnnnnnnnnnnnnnnnnnnnnnnnnnnnnnnnnnnnnnnnnnnnnnnnnnnnnnnnnnnnnnnnnnnnnnnnnnnnnnnnnnnnnnnnnnnnnnnnnnnnnnnnnnnnnnnnnnnnnnnnnnnnnnnnnnnnnnnnnnnnnnnnnnnnnnnnnnnnnnnnnnnnnnnnnnnnnnnnnnnnnnnnnnnnnnnnnnnnnnnnnnnnnnnnnnnnnnnnnnnnnnnnnnnnnnnnnnnnnnnnnnnnnnnnnnnnnnnnnnnnnnnnnnnnnnnnnnnnnnnnnnnnnnnnnnnnnnnnnnnnnnnnnnnnnnnnnnnnnnnnnnnnnnnnnnnnnnnnnnnnnnnnnnnnnnnnnnnnnnnnnnnnnnnnnnnnnnnnnnnnnnnnnnnnnnnnnnnnnnnnnnnnnnnnnnnnnnnnnnnnnnnnnnnnnnnnnnnnnnnnnnnnnnnnnnnnnnnnnnnnnnnnnnnnnnnnnnnnnnnnnnnnnnnnnnnnnnnnnnnnnnnnnnnnnnnnnnnnnnnnnnnnnnnnnnnnnnnnnnnnnnnnnnnnnnnnnnnnnnnnnnnnnnnnnnnnnnnnnnnnnnnnnnnnnnnnnnnnnnnnnnnnnnnnnnnnnnnnnnnnnnnnnnnnnnnnnnnnnnnnnnnnnnnnnnnnnnnnnnnnnnnnnnnnnnnnnnnnnnnnnnnnnnnnnnnnnnnnnnnnnnnnnnnnnnnnnnnnnnnnnnnnnnnnnnnnnnnnnnnnnnnnnnnnnnnnnnnnnnnnnnnnnnnnnnnnnnnnnnnnnnnnnnnnnnnnnnnnnnnnnnnnnnnnnnnnnnnnnnnnnnnnnnnnnnnnnnnnnnnnnnnnnnnnnnnnnnnnnnnnnnnnnnnnnnnnnnnnnnnnnnnnnnnnnnnnnnnnnnnnnnnnnnnnnnnnnnnnnnnnnnnnnnnnnnnnnnnnnnnnnnnnnnnnnnnnnnnnnnnnnnnnnnnnnnnnnnnnnnnnnnnnnnnnnnnnnnnnnnnnnnnnnnnnnnnnnnnnnnnnnnnnnnnnnnnnnnnnnnnnnnnnnnnnnnnnnnnnnnnnnnnnnnnnnnnnnnnnnnnnnnnnnnnnnnnnnnnnnnnnnnnnnnnnnnnnnnnnnnnnnnnnnnnnnnnnnnnnnnnnnnnnnnnnnnnnnnnnnnnnnnnnnnnnnnnnnnnnnnnnnnnnnnnnnnnnnnnnnnnnnnnnnnnnnnnnnnnnnnnnnnnnnnnnngatcattcctttcgtgttcatactatttgattccattccattcgtgtccattaaatttgggtccattccattcctttccattccccttgatgccattccattctgttgtaattcattcgagtcaattccattcgagtccattccattccattcgacgccattccatatgattctattccattcgaatccattcctttccattccgttccatctgattccattccattctattgctttccattccattccattcctttccattgcattcgagtccattccactccagtctgttccatttgagtccattccattccattccattccattccattccattccattccattcgagtccattcgattccattcgatatcattccatttcactctattccattctattcctttcaattacattcaattccattccattcgtttccattccattctattactatccattcgactccattcctttggagtccaatccatttaattccattccattacattccattccgtttgattccaatccgttcaattccattttgttccagtccattccattcgattccattccattcccgtccattccatttgattccagtcctttcgagtcaattctattccattccattccattggatatctttacattacactccctttcattctattctttcaattccattcaattccattcattcggttccattccattcgactccattccattcgagtccattccattccattccattccatgccattcgattctaataggttcgaatccattttgccccagtccattacattcgagtccattccattcgattccattcagttcgattccattccattcaattccattccactcgattccactcctttccattccattacattccattctattcaattccattgcattccattccattccattccatttaattattttccattcgattccattccattcgaatcaattacattacattccattacattcaagtccattctattccagtccattccattccggtccattccattcgatggaattccatttgattccattccattctattgcattccattcgagtacattcaattcgaataaattccattctagacctttcctttcgagtccattctatttctgcattgtattcgagtccactacatttgggtacattccattccactccgttccattctattccaatccattccattccattccattccattcgatgacattccattcaattgtattccttttgactccattccgttccattcagttccatccaattccattccattctattcctttccgttccattccattccattgcatcccattcctttccatttcattcgagtccattcctctccagtccattccattcgaatccattccattccagtccattccattggagtccattccattcaattgcattcaatatatttccattacactccaatccattttatttcttttgattccattcaattctattccattcaattccattccatgtgattccattccattcgaatctattgcattcaattcttttcaattcgattccattccactcgattgcactccgttccattccattgcattccattctatttcattcaattgcattccattccttaccatttgattacattccatttgattccattcaactcgaatcaattatattgcaatccgttacattcgagtactttctataccagtccataccattccactccaatacattcgattccattccatttgattccaatgtatactatttcattccattccaaaatattgcattcctttccattccattctattcgaataaattcctttcgagaccattccattcgggtccattctatttgattccattcctttcgagtccattacatttgcatccattccattccattgcattccacttgatgctattccattctgttctatttcattcgagtccattgcatttgggtccgttccactccattccattccattccattcgacttcattccattagattctactccattcgaatccattcctttccattccgttccatccgattccattccattctattccgttccattccattccatgccatttgtttccattccattcgaatccattccactcaagtccattccattcgagtccattccaattcagtgcattccattcgattccattccattccattccattcagttccatccaattccatttcattctgctcctttccattccattccagtcgtttccattcattcgagtcaattgccctccagtccattgcattggaatccattccattcgagtccattgcattcgagtccattccattcaagtccattccattccattccattccattccattccattccattccattccattccacacgatatcattgcattgccctccattccattccacacgatatctgtgcattgcactctattccattccattccattccattcaattgtattccattcgattccattccatttgattccatttcattatactccattccattcgagtctattaccttccattccattaaattccatttctttccattcgattgcactgagttctattccattttgtcccaactccattccactcggttctattccattcgaatacattccattccattccattccattccattccattccattccattcctctcgattccactctgtggcagtcctttgctgtccattctattccattccattgttttccattccattccttttgattacattccattcgattccattccatatgaatcaattacattgcaatccattgcattagattccattctattacagtccattaaattctgttccattccactccattccaatacattcgattccattccattcggttctattccattcgactccattccattccattccatccgattccattccattctattcctttccattcctttccattctattccatttgtttccattccgtttgagtccattccactccaacgcattccattcaagtcctttccattccattctattccattccactctatttgattcacttccactcaattctactccgctccattcccttgcattgcattccattccattcctttccatttcatttgattacattccattcaattcctttccattcaaatcaattactttacaatcaattatatttgtgtccgttctaatccattccattcatttccagtccattccattcgattccattcaattcgattccattccgtactattgcattctgttcgattccattctacttgaataaattccattggagaccattcctatctagtccattccatctgagtccattccattcgagtccattacttttgtgaccattccaatatattccattaaattccattcgattctattccatgcgagtccattccattcgagtccattgcattccattccatttggtgccattccattctaatctattcctttcaactccattaaactccattccattccacctgactccaatccattctatttctttccgttccattccattccttttcattccattccattagagtccattccactccagcctactccatttgagtccattccaccccagtccattccattcgattccaatcctttcaagtctattccattccattccattccattcaatatctttctattacactccattcctttctactccttttgattacattcaattccattccatttgtttccattccattctattccattcctatcgactccattccattcgagttcgttgcattctattcaattcccttacattcaatgccacagcattcaattccattttgttacagtccattctattcgagtccattccattccatatcattcgatgccattccattcgattctattccattcgactcccttcccttcctttccattccatccgattccattccattctattcctttccattcagttccattgcattacattcaattgcattcctttccatttcattcgtttgtattccattcgtcgccattccattccattccattccaaccgattccactacattctacacttttccgttcaattccattccatttcattccgttcatttctgttccattcgattccactccactccagtccattccattcgagtccattccattcgagtccaatccattcctttccattcgatatctatccattacactccattccattcaaatcattttgattccattcaattccaatccactcgattccatttcattcgattccattccattcgactccattccattcgattccaatccattcgatttcattccattacgttcgattccaatcctttccttcccattttgttgaagtccattccattcgagtcccttcccttcgagtccattcatttcgattccattccattcgattccattccactcatttccactccattccattccattgcattccattctattccattccactgcattccattccattccatttgattacattccattcaattccattccattcgaatcaattaccttacaatccattacattccagtctgttctattctagtccattccattccggtgcattacattcaaatccattccattcgattccattccatttgtttccattccatactattgaattccattcgattccattattttcgaataaatttcattcgagaccattactttcaagtgcgttctatttgattccattgcattacagtccattatgtttggtccattccattccattccattcgatgccattccattctagtccattccattcctgtccattccattcgagcagattccattctattccaatccattcgatgccatttaattccattctattccattcgactccgttccataccattccattccgtccgatttcattccattctattcctttccattccattccattccatttgatgccattccaaatgattctattccattcgagtccattccactcgtgtccaatccattccattgcattccattccaatccatttgatgcgatttaattccattctattcctctcgactccgttccactccattccgttccatccgtttgcattccattctattccattccattccattcgtttccattccattcgagtcctttccattttattccattccattcgatatcattccattacaccaaattccattctattcattttgatttcattcaattccatttcatttgattccattccattcggttccaatccattcgacttcatttgattcaagtccattccattccaatccatccctttacattccactggattccaatccgtttgattccattttgttccagtccattccattgcagtccattccactccattcctttccattcgatggcattccatttgattccattccacttaattccactccattccattccattgcattccattatattccattccattgcttaccattccattcaatttgataatcttaaattcgattccattccatacaaatcaattacgttgcaatccaatacattcgagtccattctattccagtccatttcattcctgtccattccattcgattctattccatttgattccattccatacatttgcattccattcgattccattctgttcaaataaattccattcgagaccattctttttgagtccaatctatttaagtccattccattcgagtccattatatttgggtacattccattccattccattccattgcattccatttcactcgatgtcattccattcgattctattccattcttctctattccattctattttgttcaatttgattccattacattctagtcctttccattctattgtttccattcctttcgtttccattctattcgagtccattccattcaggtccattcctttccattccatttgatgccattccaatcgattctattgcattcgactccattccattccatttctttccatccgattcctttactttctattcctttccatttcattccattccattctattccattccagtccattccattcgagtcccttccattgcattccattccactcgatatctttccattacacccaattccattctattcctttcgattccattccattccgttccattccaatccattccattcggttctattccatttgactccattcctttcgagtccattgcattccattcaatcccattctgttaaattcgattccaatcctttcgattccattttgttgcagtacattgcattcgagtccattccattccattcccttccataccattcgatgccattccatttgattctattccattcgactccattgaattccattcagttcaatacgattccattacattctattcctttgcattaaattccattccattccattccattccattccattcgtttccattcctgttgagtccattccaatcgagtccattccattcccgtccattccattcgattctattccattcgataccattctatagtttgcattccattcgattccattctgttcaaataaattccattcgagaccattcctttcgtgtccattctatttgggtccattccattcgagtccattacatttgtgtccattccattctattcctttctctttgattccaatccatttgattccatttttttccagtccattcaattcgagttcattccattccagtccattcgatgaccttgcaatcgattctattccattctgctccattccattccattccgttccaaccgattccatttcattctattcctttccattccattccattccattccattccattccaattgcttccattgcattcgattccaatccactccagtccattcccttcaagtccattccattccagtccattcctttcgagtccattccaagcaattccattcgatgtttttccattacactcctttccattctctatctttagattccattcagttccattccattcaattcaactgcagtcaattaaattccatttgacaccattccattcgagttcattccactccagtccattccattcgagtccattcccttccattccattctatttgatagctttctattacactccattccattctattgctttggattccattcaattccattccattcgattccattccatttgactccattccattcgagtccattacaatccattccattccattccattccaacgctttcgactccattttttcccgtccattaccttcaattccattccatttgattccattctactcgattcctctccgttccattccaatgcattgcattctattccattgcatagcattccattccattccatttgattacattccattctattccattccattcatatcaattacattgcattccgttaatttgcagtccgttctattccattccattccattctggtccattccattcaattccattccattcgattccgttccatactactgcattccattcaattacattctatttgattatattccattcgagaccattccattcgagtccattctatttgagtacattccatttgagtccattatatttgggtccattcctttccatgccattccattccactcgattccattccattcgattatattcaattcgagtccattccactcgaattcattccattccattccattccattccattccattccagtccattccgtttgatgccattccattcgactccattccagtcgaagccactcctgtccactccattcaattccattcctttctattccaatccgtttgattccattttgtgccagtccattctattgaagtccattcaattccagtccgttccattcgattccattccatttgattccattccactcaattccactctgttacattccattgcattccattctattccattccattgcattccattccattctatttgattacattgcattcgattccattccattcgattccattccattccaatcaattatatggcaatccattacattcgagtccattctattctattccattccattccagtccattccattcgattacattccagtcgattcaattccatactattgcatttcattcgattccattctatttgaataaattccattagtgaccattccatttgagtccattctatttgattcaattccattcgagcccattacatttcagtccaatccattccattcctctcctttccaatacattcgatgccactccattcaattctattccatttgagtccattaccttcgagtccattccattccattgcattccattcgatgccattctactcgattctattccatttaactccaattctttccattccgttccatccgattcctttctcttctattcctttccattctattcaattccattccattcattatatttccattacactccattccattctattccttttgattctattcaattccattccattcgattccattccacttggttccattccattccactccattccactccattccattcgttatatttccatcacactcctttccattctattcctttctattccattcaattccattccattcgattccattccattcggttccattccattcgactccaatccattcgactccgttccattccaatccgttccgttcatttcgattccaatccgctccattacattttgttccagtccattacattccagtacattccattcgattccattccattcatttgcattccattcaattccattccactcaattccactccgttccactccattacattccattctattccattccattgcactccattccattccatttgattacattccattcgattccattccattcgaatcaattacattgcagtccattacattcatgccctttctattaaagtccagtccattatggtccattccattccattctattccattccattcgaatcaattactttgcaatccatcacattcgagtacgttctgttccagtccattcaattctggtctattccattcaattccactccatttgattccattccattctagtacattccgctggattccatcctattcaaataagttccattcgagaccatttcttcgagtcaaatcaatttgagtccattccattcaagtccattacatctgggtctattccattccattccattccattccattcgatgccattcaatttgattcatttcctttcaactccattccattccattcagttccatccgattccattccattgtattcctttccatttcattgcattccattccattccactggagaccattccactcaagtgcatttcatttgagtctattccattccattccattccagtcgatatctttccattacacttcattccattctattcctttacaatccattcaattccattctatttgattccattcaatacaattccattacattcgactccatttcattcgagtccattgcattccattccattccattcctttatgttctattccattccattcgattccgttttgttccagtccattccactcgagtccattgcattacagtgcaaaccatttgattccattccattcgattctattccactccgttccattcctttgcgttcctttctattccattcaattgcattccattccattccatttgattacattccattgaattccaatccatttgaatcaattacattgcagtccattacattcgagtttgttctattccagtccattccactctggtgcattccattcgattccattccatttgataccattccatactattgcattccattcgattccattccattcgataccattccatactattgcattcctttcgattccattcttttcgaataaattccattcgagaccattcctttcgtgtccattctatttgactccattctattcaagtccattaaatttgtgcacataccattccattccattcggtgccattccagtccactctattccattcaagtccattacattcgaatccattccattccattcgatgccattcgattcgattctattccattcgactccattccattccattcccttccaaacggttccattccattctattactttccattccatttcattccattccattccattccattccattccattccattccattccattccatttcgttccgttcctttctgttccgttccgttttgttccattccattccattccattccattccattccatttcattccattccattccatttgcttccattccattagagtccattccactccagtccattccattcgtgtccattccattcgtgtccactgcattccattccactccattccatattattccattacactccattctattctgttactttcatttccattcaattccattccatttgattccatcccactcggtttcattccattcgactccattccatttgagtccattccattccattccatacagttccattccatttgagtccattccattccattccatacagttccattccattccgttccattccattccattccattccattatgttccattccattccattccattccattccattccattccattccattcgcttccattccattttgttccattccattttgttccgttccattccattcgaatccattccattccattccattccatttcattccattcgactgcattccattcgaatcaattgttttgcaatcccttacattcaagtctgttctattccaggccattacattctggtccattccattcgattccattccatttgattccattccattctattgcattccattcgattccattctattcgaataaattccattcgagaccatttctttcgagtccattccattcgagtccattacatttgggtctattccgttccgttccattccattccaatccattcaatgtcattccatgtgattctattccattagactccattccatttcattccattccatccgattccattccattctattcctttccattccattccattccattcgtttacaatccatttgagcccattcaactccagtgcctttcatttgagtccattccattgcattccattccattccactccattccattccattccaattgattcgattcccttccactcaattccactccatttcattccattgcattccattccattccattccattccattccattccattccattccattccattccattcctttccattccatttgattacattcgattcaagtccattctattcgaatctgttacttttcaatcgattatatttgagtccgttctaatccagtccattccattctggtacgttccttttgattgcattccattcgaatacattccatactattgcattccattcgattccattgtattagaataaattgcgttcgagacctacctttcaagtccattctttttcagcccattccattcaattccattacatttgggtccattccattccattccattgcattcgatgctattccattcgaatctattactttcgtgtatattccattccattccattccattccattccattctgtatttttccattaaactccattccattctattcctgtcgattgcattcaattccattccattcgattcctgtccatttgattccattccattcaactccattccattcaagtccattccattccattccattcaattccattccattcgattccaatccattcaattccactttgttcaagtcgtttccaatagagtccattccattccagtccattccattcgattcctttccattcgattccattccattctattctgttccatccgatttcattgcactctattcccttcccttccattccattctattccattccattcaatgccattcaattctattctattccttttgagtccattgcattcgagtccataccatttcaatccattccattccataacattcgatgccattccattcgattctactccattagattccattccattccattctgttccatctgattccattgcattctattcccttctcttccattcccttctcttccattccattcgatgccattcaattctattctattccctttgaatccatttcattcgagtccataccatttcaatccattccattccattcgatgccattccattcaattctattctatttgactcagttaaactccattcctttccatccaattcctttcctttctattcctttccactgcattccaatccattccattcgattccattccattcaattccattcttctccagtccattcctttcgagtccattccattgcagtccattccattcgagtccattccattccattccgttcgataactttccattaatctccattccattctattcctttcgattccattcaattccattccattcgatatctttccattacactccattccattctgttcctttcgattccattcaattccactccattcgattccattccactcgattccattccattcaactccatgccgttcatgtccattccattccattccgttccattctattccaatccgtcactttccattttgttccagtcaattccactcgagtccattccattgcagtccattccattcgagtccattccattccattccattcgatatctttccattactctccattccattctattcctttcgattccattcaattccattccattcgatatctttcctttacactccattccattctattccttttgattccattcagttccattccattcaattccattccattcaattccattccattcgactccatgccattcatgtccattccattccattccattccgttccatttgattccaatacgttactttccattttgttccagtcaataacactcgagtacattccattgcagtccattccatttgattcccttccattcgattcgattaaattccatttgattccattccactaaatttcattctattccattccattgcattccattctattccattccattgcattccattctattccattccattacattccattccattccatttgatttcattccattcaattccaaggcattcaaatgaattacattacaatccattacattcgagtcctttctattccagtccattccattcttgtccattccatttgattcaactccattcaataccatttgatactattgcactcctttggattccattctatttgaataaattccatttgagaccattccttttgagtccattctatttgagtccattccattcgtgtccattacatttgggtccgttccattgcattccattccattcctttctattccatttgataccattacattagaatctattccattagagcccattccattcgaatgcattccattccattccattccatgccattcgattcgattctattctattcgactccattccatttcattcggttccatctgattccactccattcttgccctttccataccattccattccattggtttccattccattggagtccattccactccatcccattccattcgagtccattccattccagtccatttcatttgagtccattccattccattcaattccacttgatatctttccttttcattcctttccattcttttcctttcgattccattcaattccattccattcgattccattccactgtattcctttccattcgactccattccattcgaatccattccttttcattccattccattccattcctttctgttcgacttcattccgttcgattcctatttgttgcagtccattccattcgagtccattccattccagtccattcaattcgattccattccattcgattcccttccatttgattccattccactcgtttccactccattgcattccattgcattccattctattccattccattgcatatcattacatttcctatgattacattccatttgattccattcagctcaaatcaattggattgcaatctattacattcgagtccgttctattccagtccattccattctcgtccattactttcgattccattccatactattgcattccattcgattccactgtattcgaataaattccattcaagaccattcctttttaatccattctatttgagtctattacattcaagtccattacatttgggtccatccaattccagtccataccattcgatgtcattccattctattctattccattctactccattccattccattaaattccattccattctgttccattcgattccaatccattacattccattttgttccagtcagttccactcaagtccattccattttattccattcaattccactcgagtacattccattccagtccattccattcgattccattcctttcgattccattccattcaattcgattaaattccatttgattccattccactctattccattctgttccattccactgcatgccattctattccattcctttgcattccattccatttcgtttgattacattccattcaatttcaaggcattcgaatcaattacatttccatccattacattcgagtgttttctattccagtccattccattccagtccattccatttgattaaattccattcgattcatttagatactattacattcctttcgattccattctattcgaataaattccattcgagaccattcctttcgagtccattctatttgactgcattccattcgtgtacattacatctgggtccgttccattgcattccattccattcctttccattccattccatgtcattactttcgattctattccattagagtccattccattcgagtccattccattccattccattcgatgtcattccacacgattctattccattcgattccattccattccattcagttccatcctattccattccattgtagtcctttccattccattccattcatttcctttccattcgagcccattccactccagtccatttcattcgagtccattccactccagtccatttcattccattccattccgttcaattccatttgatatctttccatttcactccgttccattccattgcattctatttaattgcatttcattccactccattccattcgtgtccattccttttcattcctttccattccattgcattctgttctacttcaatccattcgattccattttcttccagtccattccattcgagtccattccattccagtccatttgatttgattccattccatttgattcccttcctttcgattccattccactcaattccactccgttcctttccattgaattccattccattccattccattgcataccattgcattccatatgatttcattccatttgattccatacaactcaaatcaattggattgcaatgaattacaatcgaaaccattttattccagtccattccattctggtccattccatttaattccattccatactattgcgttccatttgattgcactgtattcgaataaattccattagagaccattcctttttaataaattatatttgagtctattgcattcgagttcaatacatttgggtccatccaattccattccattccattcgatgccattgcattcgattctattccattcgagtccattccatttgattccattccgttccattccattccattcgatcacattcctttcgattccattctgctccagtccattccattcgagtactttccattcgagtccgttccattggaatccattccattccattccattgctttcgatatctttccattacactccattccattctatttcttaagattcaattcaattccattcctttctgtttcgttccatttgactccattccattcaagtccattccatttcattccattctgtccgattcaattccgttcaattccattttgatccaatccaatccgttcgagtccattctatttgtttcccttccattccattccattcctttcgatgccattccattcaattctattcaagtccattccgtctgagtccattcgattccattccaatccactccattccattagatgccattccatttgattctaatccactcaactccattccattccattcctttccatccgattccattccgttctattcctttccattccattccattccattccattcatttccattgcttttgagttttttcctctccagtccattccattcgagtccattccattgcaatccacttgattcgagtccattccattccattactttcattcgataactttcctttacactccattcctttctattcctttctattcatttcgattctattcaattctattccattcgattccattccattctactgcattcctttctagtccattccattccattcgatatctttccattacactccattccactctattcctttcaattcctttcagttgcattccattctagtccattccattaaaatccactccattcgattccattccattccattccttttgattcgatatctttcctttacactccattcctttctattcctttcggttctattcaattccattccattcgattccattccattcgattccatttcattcgactccattccattcgagtccattccattccattcaattccattcgatatcttccattccattccattccattctattcctttgaattccattcaattcaattccattcgagtccattctattgcattccattccattccgttctgttcgattccaatccattcgattctactttgttccagtccattccattcgaatccattcccttccagtgcatcccatttgattccattccattcgactccattccactcgattccactccgttccattctattacattctattctattccattccattgcattccattccattccattttattacactcctttcgattccattccattcgaatcaattacattgtaatccattacattcgattccattctattccagtccattccattcctgtccattccatttcgttagattacatttgattccattaaatactattgcagtctattcaattccattctattagaataaattcctttcgagaccattcctttcgagtccattctatttgagtccatttctttcgactccattacatttgggtccattccattccattcctttccagtccattacattgcagtcgctgccagtccattcgattctattccatttgagtccattacatttgggtccattccattccactccattccattcgattctattccatttgagtccattccattcgggtccattccattcgatgccattccattcgagtccatttcactccagtcgattccattcgatgccattccattcgagtccatttcattcgaatccattccattgcattccattcgattctattccattcgactccattccctttctttccattccatgaaattccattccattctattcctttccattccattccaatgtattacattccattccgttcgtgtccattccactccagtccattccattcgagtccattccattccagtgcattccattcgagtcaattccatttaattccattagacatttttccgtttcactccatttaattctgtttctttcgtttccaatcaattccattccatttgattccgttacattcgattccattccattctactccattccttttgactccatttctttccatttcattgcattccgttccgttcgttgccaatgcgtttgattccattttgttcctgtccattccattcgagtccattccattcgagtccattccattagattccattccattcgattccatgccactcgactccactctgttccattccattgcgttgccttctattccatttctttgcattccattccattccagtgcattccattcgtttccattctattagactccattccactccagttcattcctttcgagtccattacattccagtccattccactcgaatccaatccattccattccattcgacatctttccattacactccattccattctattaattttgattctaatcaattccattccaatagaacaccttcctttcgattccattcctttcgactcctttccattcgagtccattctattccattctattccattccattaaattccattcctttgattacattccattcgattccattccactcgattccactccgttacattttattgcattccgttctattccattccattgagtaccattccattctattctattccattcgagtcgatttctttagagcccattccattccattccattcgatgtcattccgtttgattcttttccatttgaatccattccattccattctgttccatccgtttccattccattctgttccatccatttccattccattctattcctttccattccattccattccatttgtttccatttcattcgattcattctattcgaataaattccattagagaccgttcctttcgagtccattctgtttgagtctattccattccagtccattacatttggttccattccattcccttccattcctttccattccatacgttgccattccattcatttctattccattcgactccattccattccattccattccatccgattctatttcattctattcctttccattccactccattccattcgtgtccattccatttgagtccgttccaatccagtccattccattcgactccattacactccagtccattccatttgaatccattccattccagtccattccattcaagtccattccattccatgccattccattcgatatctttccattacaatcctttccattctattctttttattccgttcaattccattccatgtaattccattccattcgattccattccattcgactccattccgtttgagaccattacattccatttcgttcaatttgattgcaatccgttcgattccattttgttccagtatattccgttcaagtccattcaattccagtccattccattcgattccagtccattcgattccattccattccaattgattcttctccgttccattacattgcattccattctataccattccattccttttggttacattaaattcgatttcattccattcgagtcaattactttgcaatccattacattcgagtccgttctattccagtacattccattcgattccattccattgcattccattccatactattgcattccatttggtcccaaagttttcgaataaattccattcgaggccattcctttagagtccattctacttgagtccattccattcgagtccattacatttggatccatttcattccatcccaatccattccattccattcggatccatttcattccattccattccattcgatgccattccatacaattatgttccataggtgtccattcctttcgaatccattccattccattccattccgttccatgagattacaatccattcgattgcattccattcaaatcaattacttttcaatgccttaaattgtagtctgttccattccagtccattccattcctgtccattccattcgattccattccatactattgcattcaatttgattccattctcttcgaataaattccattcaagacaattcctcttgagtccattccattcgaatcaattccattcaattccattccattcgtttccattcctctcgattccactccattccattctattgcattccattctgttccattcccttgcattcctttccattccatttgactacattaaattcaattccatttcatttgagtcaattacattgcaatccattacattcgagtgtgttgtattccagttcattccattccattccattccattccattggattctattccatactatttcattcctttcaaatccatgctattcgaataaattccattcaagaccattcccttccaatccattctatttcagtcccttcaattcgagtccattgcaatggggtccattccatttgtttccattccattcacttcgatgccattccattccattctattccacttgagtccattccgttcgagtccattccattccattccactccattccattcaattccattgcattcaattctattccattcgactccattccattacattccattccatccgattacattccattccacccgattccattccattctattcctttccattccattccattcattccattccattccattccatatttccattccattcgattccattccactccaggacattacattccagtccataccattagagtccattccattagagtccatttcattacattccattccatttgatatatttcctttccattccattccattccattgtattcctttcgattccattcaactctacaccattctattgcatttcattcaactccattccattcgattccattccaatccattccattaaatttcgttctgttcgattccaatccgttcaattcctttttttccggtccattccattcgagtccattccattccaggccattccaatcggttccattccactcgattacattccatttgattccattccatttgattccactccattccattccattgcattccattctatttcattccattccatttgattacattcgattcgattctattcccttcaaatcaattacatttcagtccaatacattcgagtccgttctattccattccattccattccattctgttccattccttttgattccattccattccattcccttccatactgttccattacattcgactctattctatttgaataaattccattcgaagccaattctttcaagtccattttttttagtcccttccattcgagtccattacatttgggtcaattgcattccattcctttccattccatttgatgccattccattcgattctattccattcgagtccattcctttccagtccattccattcgttgccattcgattcgattctattccattccactccattccattacgttccatccgattccaatccattctattcctttccattccaatccaatctgctcgattccattccattcattgcgatccatttcattcgtttcatttccattcgcgtcatttccactccactccattccattagagtccattcaattccactacattccatttgactcctttccattcgatttctttccattaaaaccattccattctattcctttggattctattaaattccattcttttccattccattccataccattccattccattccatttgactccatttcattcgagtccattccattcaattccattctgttccattctattccaatctattcaattccactttcttccagtccaatccattcgagtccattacattccaatccattccaatcgattccattcctttctattccattccgttgaattccattccattcgattccagtccaatccattccactgcattactttctattccattccaatgcattccattccactccgtttgatcacattccattcgattccattccattcaaatcaattacattacaaaccattacgtatgattccattctattcctgtccattccattcctgtccattacatttgattctattccattagaatccattccatactattgcattccattcgattccattctattcgaataaattccattcgagaccattccttttgagttcattccttttgagtccattccatttgagtacgttacatttggttccattccgttccattccattccattccattagatgccattccatttgattctaatccattcgagtccattccattcgacttcattccattccattcaattccattccattcaattccattccatttcattccattccattccatttcattccattccattccatttcattccattccatttcattccattccattccatttcattccattccattccatttcattccattccattccatttcattccattccattccattcgaagcaattcctttggattctattccgttcaactccattccatttcattccatttcaaccgattccattccatttcattccattccatccgattccattccattccattccacccgattccattccattccattccactcgtttccattacattcgtgtccattccactccagtccattccatttgagtaaactgcaatccagtccattccattgaagtccataccattctatttgatatctttccattacactcccttacattccattccattcgatgccatttcattccattccattccattcaagtccattccattagagaccatttcattccattgtgttccatcccttccgcttccattccattccattccatttcattccattccattcgtgttcattacattcgagaccattccactccagtccattaaattcaagaccattccattccagtccattccattccgttctgctcaattccaatgcgttcaattccattatgtgccagtccagtccattccagtccattccattcgattccattccatttgattctattccatactattgcattccattcgattccattcttttgaataaattgcattcgagtccattccttttgggtccattctatttgagtccattccatacgagtccattatatttgggtccattccacactattccattccattccattccattccattccattccatgcccttccattccattctattccattgagtccactccattcgagttcattccattccattccatttgatgccatactattctatactattccatttgactccattccattccattccattggatgccatatcattctattctattccatttgactccattccattccattactttccatccgattccattcctttctattccttttcattccgttcccttccattgcgttgcattccattccattccattggtttccattccatttgcgttcattcaactccagtacattccattcgattccattcccttcgactcccttccaatcgagtccattccattccattcaattcctttcagtttgattccaatccgttcaattccattttgttccagtccattccatttgaatcctttccattccagtccattcctttcaattccattccattcgaagccattccattggattctattccattcaactccattccattccatatcattccatccgattccattccattctattcctttatatttcattcccttcctttccattccatgacattccattcgtctccattccattcgagcccattcctctccagtccattccattcgcgtgaattccattacagtcctttccattccattactttccattcaatatctttccattgcactccattccattctcttcctttcgattccattcaattccattccattcggttcgattccatactattgcattccattcaattccattccattcgtataaattacattcgagaccatttctttcgagtccattatatttgagcccattccattcgattccactacatttgggtccataccattccattccattccattccattcgatcccaaaccattttttttctattccattcgagtccattccaatcaagtccaatccattccatttgatgaaattccattcgattatattccattcgagttgatttcattccatttggttccatccgattacattccattctattccgttcctttccattccattccattccattcttttccaatccatgcgaatccattccactccagtccattccattcgtgtcccttccattccagtccatgcctttcgagtccattccattccattcccttcaatgtctttcaattacactccattccattctatttcattcgattccattcaattcaactctattcgattcccttcacttcgattccaatccattcgactccattccattcgagtccatttcattccattccaatgcattctgttcctttccataccaatccgtttgattccatttagttccagtacattgcattcgagtccattccattccattccattcgaagccattgcattcgattttattgcattgaactccattccattccattcctttccatccgattccattccattttagtcctttccattccattccattctattcgtttaaattccaattgagtccattccactccagtccattccatttgagtccattgcgttccagtccattccattcgagtccattcctctccattcctttccatttgatatctttccattgcactccattcctttctattcctttcgattctgttcaattccattccattcgattccaatccatactattgcattccattcaattccattctatcatataaattacattcgagaccatttatttcgagtccattcaatttgagcccattcaagtccattacttttgggtccattccattctgttccattccattccattcgatcccattacatttgtttctattccattcgagtccattccaatcgagtccattccattccattcattgaaattccattcgattctatttcattcgagttgataccattccattccgttcaatctgattccattccattctattccattccattccattccattccattccattccattcgtttccatgccatttcaatccattccactccagtccattcctttcgagtccattccattccagtccattgcattcaagtccattccattccattccattcgaagccattgcattcaaatttattccattcgactccattccattccattccgttccatccgattccattccattctattcctttccattccattttcttccattacattcatttccattccattcctgtccattccactccagtccattccatttgtttccgctccattccagtacattccattcgagtacgttccattgcattccattcaattccattcgatgccactccattcgattctattccaatcgactccattccattccattccgttccatccgattgcattccattctattcctttccattccattcccttccattccattcttttccattccattctgtttcatttcattccattccattccattcaatgccattcaaattgactccattccattccattccgttctatctgattccattccattttattcctttgcattccattccattcctttccaatccattccaatcttctccattccactccagttcattccatttgagtccattccattacagtccattccattcgagtccattccattcgattccaatcgattcgattgcattccactcgattccactccattcaattccattgtattccgttctattccattccactgcattccattctattccattccattgcattccattccattccatttgattacattccattcgattccattccattcaaatgaattacattgcagtccattacatttgactctgttctattccagtccattccgttcctgtccattccattcgattccattccattcgatttcattccctccgattccattccattctttaccattctattcgaataaattccattcgagaccattggtttcgagtccgttctatttgagtccattccattcgagtccgttacatttgggtccatcccattccattccatttaatgccatcccatttgattctattccattcgagtccattgcattctagtccattaaattcgagtccattcctttacactccattcccttccattctattcgactccattccattcctttccattccgttccattccgttccattccattccattccgttccattccattccattcgattacattccattcgcgtccattacattcgattccattccatttgattccataccttttgattcaattccattcgagtccattccataaaattccattctttcctttccgttcctttccagtccattcgattccagtctattctaatccactccactccactccgttgaattccgttacttcccattccatctctttccaatctatttccctccactccactaccctccattaaatgccattccaccccattccattccactccatttcaatccactctactccacttcattgcattccatttgattgcattgaatgcctttcgatttcattccactcgattccattccattccattccattccattcaattctattccattcattccattcatttccatttcattccattccatgccattgcatttcatttccactcccctctactgcactccattccgttcaattccattccttctcattccattccactccattccactccattccgttccactcacttccattccacccctttccattcccctccatttcactcctctcttctccactgctttccattcgatgcctttcgattaaattccattcgattccattccattcatttgcactccagtccactccattccaatcctttccgttccattctattcgattccattccactccaagccactctgatccactttattccattccattccattgtattcaactccattccattcaattccgttctattcctttccactccactccactacactccattgaaatccattcctccccattcctttccactccattccattccactgcactccatttcaatgcataccattcgattacagtcgtttccattcgattccattctaatcgattccaaaccttttgattccactccattcgattagattccattccattcgatttcattcctttcgatttgattttattccattcgggtccattcctttcgattatatttcactcgattgcattccattcgagtccattcctttcgagtccattaaattaaattccattctttccattccattccagtccagtccattccagtccattccagtccactcctctccactccactccattcaattccattacttctcattccattccattccactccattcttctccactccactacattccattcaatttatttccacccaattccattacactccatgacaatccattccactccagttcatcacattccatttgattccattcattgccattcaattccattcctttcgattgccttccactttattcctctccatttgattccattccattctattccattcccgtcgattcatttccattcgattccattacattcgaggacattccattcaattcgtttcaattccagtccattccattgcagtccattccttttgagtccattccattcgggactattccactccagtcaattccattcgagcccattctattccaatccatttcactccagtccattccatttgagtccattccattcgagtccattccattccagtccaatctattccagtctattccgtttgagtctattctgtcggagtccattatattcttttccattctcttccctttcctttccttcctttccattcctctccacttcactcctttccattcctttccacttcactccattccattccactccactccattctattccactgcattccactccattccacttttccattccattccattccattccattccattccattctattgcattccattccactctgctctgctccactccactccattcaattccattctttctcattccattccactctattcttctccaatccactccattccattcaattccattccactctattccattccactgcattccacttctctctactccacttcacagcattccagtcgatgccattcaattcctttccattcaattccattccaattcattctatttcatttgattccattccattccattcaatcccgttccattccattccattccattccgttccattccattccattccattccgttccattccattcctttccattccattccattccattcaattcgagtccgttccattccattccattccattggattcctttccaaactattccattccattcaagtacattccctttgagtccattccattccattccattccattccattccattccattccattcccctccattccactcaactgcactccactacattccattcctttctattccattacattccattgccctcctgtcgactccattccattccattcctctccattccattccactccattcggtactttcctttacactccactcctctccactccactccattccacttcactctattccattccattccattccattgcattacaatccactccactccactccactcaattccattccttcccattccattccattccactccatcgcacttcatacaattgagttccacatcattcaattccactccatttcactccactccacttaaccgcattctgttagattcaatacgatgccattctattcctttacattccatttcattccagtcgattccattctattcaattccattccattcgattcaattccttttgattccattccagtgtattccattcaatttgattcccttccactcgattccacaccatttgggtgcttttcattcgagtccattccattcctctccattccctcccagtccattccagtccagtccattttactcgagtccattgcattccattccttcatattccattccactatactccattccattccattgcattgcactccactccactccgttcaaatccattccaatgcattccattccattccattgcattccattcaaatctattccaatccattccattccattccactccattccataccattccactccactcgactccactccattcctttccattccattcaactcaactccaaacaaatccactcccctcgattcctctacattccactctattccactcaaatccactccactgcactccactccactccacttcactccactccactccattccattccattgctttccactccactctgttcaattccattcctttaaattccattttatcacattccgttagattccactgcactccactccattgaattccagtccaccctattccattccacaccattccactccactccactctacttcacggcatcccattcaattccatttgatgtcattcgattccattcagttccattccatttgattccattccattcaatttcattcctttgaattccattccgttagattccattgcattcgaggccattccattccagtctactgcattcaggtccattcagtttgggtccattacattcgagtccattccactcgcgtccattccatttcattccattccactccactccactccactccattccactccactccattacactacattctgctccagtccattccattccattctattccatcccactgcaatccactccactgcactccactccattctattctattccactccactccatttcattccactccactccattccactccactacattccaatccaattcattccattccattctattcaattccattcctttccattgtgttccatcgcactgcaatccactccactcctctccactccaccccattccattctattccactccattccatttcattccaatccactccattctactccactacattccattccaattcattccattccattctattacattccattccactccactcctctccattcaattccatttccattcattccatttcattccactgtaatacattccattccattccattgcattccagtccagtccactcccctccgttcaattccattccttcccattcaattcctttccaatccatttcacctgactccactccactccattcaattaaattccaccccattccattccacttcattccactcctctccacttcaccacattgttttcaaatccattagatgcttttcgaatccattcaattcgaatccattccattcgattccattccattcaatcccattctatttgattccgttccattcgattccattgcatttgattccttggcatttgattccattccattccattccgttccattgcattccattccgttatatttgactcaattccatttgagtccattccttttgagtccaatccattccagccattccactggaatccaatccattccagtccattccatttgattcaattccattccaatccatttcattccactccactccactcgtctcccctccactcaactccattccaatcaaatccaatgcattgcactcaaatacattgcattccattccattcaattcctttccttcccattcctttccattccaatcaatttccctccactccactccattctattccattccagcccattccattccactccattccactccactccacttcacagcattccattcgattccattccattccagtccattccgttcaatttcattaaattcgattccattccattcgaatccattcctttcgaatcctttcctttcgatttcattcccttctgttccattccattccattccatttcattcgattccagtccattccattcctttccattccattccattccactgcattccactaactccactccactctgctttactccattccttcccattccattccactccattctaatccaatccactccactccattctattccaatccactccactccattctattccaatccactccattccactccattccactcctctccactccgattcaccgcaatccattccatgccatttgattacattcaattcaattccgttctaatccattcaattacattcccttccattccattccattccattccattccattccattccattctatcccattccattccattctattccattccaattcagttgattgcattccattccttttgattccttgccattccattccattcgatactattccattctattccattccattccattttattccgttccacttcattcctttgcattcaattcctttccattccattccattccattccattccattccattgcattccattccattccattccattcattgattccattcctttggattcccttccattgaattccattccattcgagtccagtccattccattccaatacatttcgttccattccattccattccattccattccattccattccgttccataacccttcactccaattcactccccttaacgccactccattccattcgattccattccattctattccattcaattccactcaattccattccattccactccactccattccactccgtttcaatctattccactccattccattctattccattcctctccactcaactccactccactccattccttttcactccattccattctattccatttctttccaatccactccactccattcaattccattccttcccgttacattcaattccactccattcctctccactcctctccactccattcaattgcattccaattctttccattgcacaccactccactgaacttcaccacattccattcgaatcctttcgatgccatttgattccattccattttatttcattcgataccatttgattccattcctttcggttccattccatttgattgtgttccatttgattccttgcattcaattccattctatgtcatttgattcctttccattcgaatccactccattccatttgattccgttgtactccattctactccattcgagtccattccactccattccattcctttccattccatttgattccattcctttcgagtccattgcattcaattccattcgattccattcgatactattccattccattccattcctttcaattccattcgtgtcatttccattccattccattccattccattccattccattccattgcactgcattccactccactccactccactcttttcaattccattccttcccattccattccactctgttccaatccaatccactccactccattctattccattccactccattccattccactcaattccactcctctccactccagttcaccgcattccatttgatgccactcagttccattccattcgattccattccattccattcatttccattccattccgttccattcctttccattcctttcgattctattgcattcgattgcattccatttcatttgattccattccattagattccattccattcatttcccttccattccattcagttccatcccattccgttccattccaatccattcccttccattccattgcatttgattccattccatttcatttgattccattccattccttttgattccattgcactcaattccattccatttcactctattcgagaccattccattccattcctttccactctatttgtttccattccattcaattccattccattcgtttcgtttccattcgtttccaatcaattccattcaattctattgcattctattccattccattcgagtccattcccttccattccattcccttctattccttccattccattccactgcattccactacactcctattcactctgctcaattccattccttcccattccattccactcctttccaatgcaatacactccagcccattctattccattccactccattccattccactccattccagtcctctccactccacttaaccgcaatccattcaatgctgtttgattccattccattcttttccattccactccattgcattccattccatttcgttccattccattctactccattcctttctattctattccattccttttaattccattgccttcaaatcttttcgagttaattcctttccattccattctattccattccattccattccattcgtttccattcctttcaataccattcctttggattccattccattctattccattccattcgagtccagtccattccaatccattccattaaaatccattccattccattacaatccattccattccattccactccattccattccatttcccttcactccactccattttgtgccacttcattctattcgatttcattccattccattccaataaattctgctctactccattccattctattccagtccattcaactccattccattccattccattctattccattccactccactccattccattccattccactgctttcccatccactccactactttccgttcaattacattccttcccattccattccattccactccattcctctccactcctctgcactccgttaaattccattcattatcattccactctactccattccactccaatccactccactccattcaattccattccacaccattccattcccgtccattccactcctctctactccacttcaccacattttattcgatgccattcgtttccattccattccattccattccattccattccattccattccattccattctgttccattccactcggttttaatcaattccattctattccattccattgcttttcaattcctctccactccactcaactccattcaattatatttcttctctttccattccactccattcaaaaccagtgcactccactgcattcaattccattccacccctctgttctccacttcaccacattccagttgattccattcaattcctttccattggattccattccattggattgcattcctatttctttctattctattgcattccattcaattccattccatttgtgtccattccattccattcccttccattccattccattccattccattcccttccattccagtccatttcattcttttccattccattcctttccattccattccattccattcagttccatttctttcctttccattgccttgcattccattccattagattccattacattcgattctcttctatttgattcctttcatttgattccattcctttcgtctgcatttcattcgattcctttacattcgattccattcccttctattgcattccattcgattgcattctatttgataccattccattccgttccattccattccattccattccattccattccattccatttcattcgattccattcattttgagtccgttccattgcaatccattccattcaagtccattcgattccactccattccattcccgtcccttccattcgattgcttttcattcgattccattccactcgattccattccctttgcatccattcctttcgagtacattcgattagtgtacattccattcaagtccattccattcgagtccattccattccagaccatttcattcgattccatcccatttgcttccaatccattcgatccccttccttttgattccacactgttagagcccattccatttgagtccaatccatttgattccattacattacattacattgcattacattacattcgattccattccatttgattccgtttcattggattccattacattggagtccattcctttccatttgattccattccaatccattccattccattccattccattccattccattccattccattcaattccattccattctaatcccttccattccattccattcctttcgagtccattccattccagtccattcctttcgagtatattccattccactccattccattccattccattggagtccatgcggcttgagtcaattccacccgagtccatttcattcgagtccattcctctcgagtacattccatttcactccattccattccattccattccattccattccatttgagtgcattccattcctatccaatccattcgagaacattccattccattccattcctttccatttgattccattccattacagtctgttccattcaagtccattccattccgttccattccatttcattccattccatttcattggaatccatgtgtcttgagtccattccacccaagtccattccattcgagtccactccactcgagtccattccattctagtccatttgactcgagtccattcaactcgagtccattcaattcaagtccattcctctccagtccattccatttcactccattcaattccattacatttcattcgattccattccatttgattccgtttcatttgagtccattccattcctgtccaacccatttgagcccattccattccattccactcctttccatttgattccattctattcgagtccattcgcttcgagtccattccattctagttcattccactagagtccattccattcaattccagtcaattcgagtctgttccactcgattccattccattcgagtccattccgttccatttgatttgattccattccattcgggtccattccattcgtgtccattccactgaagtcaattccattctagtccagtcaactcgagtccattcaactcaagttcattccattcgagtctattccactcgagtccatccattccactccattccattccagtccattccattcccctgctctgaactccattaccttccactacactccattccactccattgcattccattccactccactccaatccactccactatgttcaattccattccttcacattccattccattgcactgctttacactcaactcaactccactctattcacttccatttcacccctttccattcccctccattccacaccactgccctccatttcactgcattccattcggttccaatcgatgccattctattccattcctttcggttccattccaatcgattccattctattagaatccattccatttgatttcattccattcgagaccattccattccattcgatccaattccattcgattccattccattctattcaattcctttcgaatccattccattttactcctttccgttgtagtccattgcattccattccacttgatttcattccattccattcgtttccaccccattccattccattccaatctattccattcgattccattcaattccattccgttccgttccattccatcccattcaattgcattccaatgcattccattccattcctttccattccattccattccattcgatatctttccactgctttccattccattccattcgagtccattccattcaagtctattgcgctcgagtccattccattccattccattccattccactccactccactacattccattaccccatacccattgtattccactgcattccagtccattccactccattccattccattccattgcattccattcaaatccactcccatccaatccacaccgttcaattccattccttccccttctattccattccactccaaaccactccactccattccactccaccccactacattccaatccactccactccactacattccattccactccactccactctactccactcctctctgttccactcaaatccgttctattcctttccttcccattccattccactccattccactgcactccactccattccattggatcccattccatttgattccattccattcaattcaattccttctgtttccattccatttgagtcctttccattgtagtccattgtattccattccattccattttactccattccattccattcaattccactccattcgatcccactccattcgatcccactcctttcgatcccattccatttgattcaattccattttattccattcaatttgaatgttttccattcgaggccattacattggagtccaatccattccattgcatttcatttcattccattgcattcgattccattccattccattgcgttcttttccattccattccattccattctgttcttttccattccattcgtatccattccatttcagtccattccattcgattccattccattccagtccattcctttttattcctttcctttcgattccattccattcaattgctttcaattcgattctcttccaattgattccattcctttggagtcaatatttttcgagtccgctgcattcaaatccattccatacgagtccatttcattccagtcaattacatttgagtccattccattccagtccataccatttgattccattcccttccattcaattcaatatctttccattccattccattcaaattcattccattagattctattccattagatgcgagtccattccatttgagtgtattccactcgagtacattccattccattccattccattccactccattccattccattcctctgcatttgattccaatacactccattccattccatcccattccattgcattccattcgaatccactccactccactccacttggttcaattctattctttcctattccataactttccactccattccactccactccattccattcaatttcatttcaccccactgcattccaatccattctactccactgcactctgcttcaccgcattccattcgaatccatttgtttccatttgatttcattccacttgattccattccattcgattccattccattcatacccattccatttgattccgttccattccattggagtccatttcattcaattccattccattcctttccattccattccattccattccattagattccattctattctattctattccattccatttgtttccattccatttgactgcatttctttcgattccattccattcgattacattacattctattgcattccataagattacattccatttgataccattctgttccattccattgcataccattccattccactcgattccatgttatttgattccattcattttgagtccattccattgcaatccatttcattcaagtccattccgttccactccattccattgcagtccattccattcgattgcattgcattcgattccattccattcgattccattccactcgattccattcccttcgagtccattccattagtgtccattccattcgagtccattccatttgagtccattccattccaggtcattacatttgattccattccattcgattccattccattcgatccccttccattcgattccataccattcgggcccattccattcgagtccaatccattcgattccattcgattccattccattccattccattccattccattccattccattgctttccattcgattccattacattggagtctattccattccagttggttccattccattatattccattatattccattcgagtccattccattcctgtccattccattcgactccattccactccattccattttattccattccattccattcctttccattggagtccatttggctggagtccattctacctgaatccactgcattggagtttattccactcgtgtccattccattctagtccatttgactggagtctattccactcgagtcccttccactcgagtccattccatttctatccattccattccttcccatttcattcaattccgttccattcgagtccattccattcctgtccaatccattcaagtccattccattccattccattcctttccctatgattccgttcaattcaagtccattcccttcgagtccattccattcctttccattccattccattccattggagtccatgcggctcgagtccattcggcccgcatcaattgcattcgagtcctttccactcgtgtccattccattctagtccatttgactcgtgtccattccacacgagtccattccattcgagtccattcctcccgagtccattccatttcactccattccattctattccatttcattctattccattccattcgattccattccattcgagtccattccattcctgtccaatccattcaagtccattccattccattgctttccatttgattccatttgattcgagtccattcccttcgagtccattccgttccagtacattccattcaagttcattccactccaccgcatttcaatccattcctttccttttcagtccatttgattcaattccactctactccactccattcctttccattccattccattccattgaactgcaatccaatccactccactcaactccacactactccactcaactcctttcccttctgttccattccattccattcaattccattccattccattccactccattccactgcactccattgcatttcactccattatactccattccactccattccactccactccactccactccattccattccactgcactccggtccactccactcaactccactccactccactcaacctccactccattctattctgttcccttccattctgtaccattccattccattccactccactccattccactccactccattccacaacattccactccattccactgcactccactccactgcactccattccattccactcaactgcactccattccattccactgcattccattccgttgcattccactccattccaatgcactccattccaccccactccactccattatactccattccaattcattccattaatttccattgccttctactccattccatttcattcacttccactccattcctctccactccattccactcctttctgttactgtccactccactccattccactcctttcctttctgttccattccactccactccattcaattccactctactccattccattccattcctttatttcaattggctgtaactctgtctcccagactgtagtgcagtgacacaatcttagctctcatttcctttcaccactgtgttccattccattccattccactccactccactccattccactccactctattccatttcattccattccattccattccattgcactctcatccactcaactcaactcctctgcactccactccactccattccgttccattccactcctttccattacattccattcctttccattccattcctttccactccacttcatttcaatccactcctttccattaaattcctccctactccactcctctccactccattccattccattcgactgcactctgatccactccactcaactccactccactcaactgcactccaccccactccactccattccactccactccactccattctgctcctctccatgccattccactccactccattccattccactccgctccactccatttcattccactccagtcctttacattacactccactccattccattccattccagtccactccactccactccattccactccactcctctccactccattccattccattcgactgcactctgatccactccactcaactccactcttctgttctccattccgttccattctgtcgcattccattcctttccattgtattccatcccactctaatccatgccattccactcctttcctctcctcttcactccactccaatccactccactccattccattccatttcattctattccactgcattctgatacactactctcaactccactgcactccagtgcactccattccactcctttccattcctttccattcagttccgttccattccattccattcccctccactgcattccactccactccatttcactccattccactcccttccactcttcttcactccactccactccagtctattccactctaatccattcctttccactccactccagtccattccactctaatccattcctttccactccactccactccattccattccactctattccattcctttccactctattccattccattccattccattgcactccattcaactccactccactccactctccaattcactctactccactccactttaatccactcctttccactccactccattccagtccactctattccatttgactccactcctctccactccactccattccatcccattcctttcaaatcccctccattccgttgcactcctctccactccactccactccaattgtcaccactccactctactcctttccattccactccactcaattccattcccttccattctgttccattccgtttcattccactgcactctgatcttcacataaaaactagacagaagatttctgagaaacttttttgtgatatgtgcattcacctcacagagtttaaccattcttttgattgagcagtttggtaaaagtcttgttgtagaatctacaaaaggatatttgtgagcactttgaagcctgaggtgaaaaagtaaatatcttcacagcaaaactagaaagatggtgtctgagaaagtgctctgtgatgtttgaattcatctcacagacttcaacttttatattgatttagcatattggaaacagtctttttgtagaatctccaaagggatatttttgtacacttggaggccaatagtgagaaaggaaatatcttcacatgaatactagacagaagctttctgagaacttctgttttatgtgtgcattcctctcaaacagttgaaccattcttttgattgagcagtttggaaacagtctttttgtagaatcagcaaagggatattgtgagcgctttgagtcctacggggaaaaaggaaatattttcacataaaaactctacagaaggtttctgagaaactgctttgtaatgtgtgcattcatctcacagaggtaaatgtttcttttcattgagtagatgggaaactcttttcttgtagaatctgcaaagggatatttgtgagcactttgaggcttatggtgaaaaaggaaatatcttcatataaaatgtagacagaagctttctgaggaacatatttgtgatttatgcattcatctcatagagttgaaccattcttattttttttggagctctgggtttattttttaattatttacttttattattattatactttaagttttagggaacatgtgtacaacgtgcaggtttgttacatatgtatacatgtgccatgtttgtgtgttgctcccatgaactcatcatttagcattaggtatacctcctaatgctatccctccccctccccctcctcccacccaactacaatccctggtgtgtggtgtgtgatgtttcccttcctgtgtccatgtgttctcttcgatcaattcccaactatgtgtgagaacatgtggtgttttattttttgtccttgcgatagttcgctgagaatgatggtttccagcttcatccatgtccctacaaaggacatgaactcatcattttttatggccacatagtcttccatgatgtatatgtgccacattctcttcatccagtctacagtggttggacatttacgttggttccaagtctttgctattgtgaatagtgctgctataaacatacgtgtgcatgtgtccttatagcagcatgatttatagtcctttgggtatatacccagtaatggcatggctggctcaagtggtatttctagttctggatccctgaggaatcgccatgccgacttccacaatggttgaactagtttacagtcccaccaacagtgcaaaagtgttcctatttctcacatcctctccagcacctgttgtttcctgactttttaatgatcgccattctaactggtgtgagatggtatctcattgtggttttgacttgcatttctctgatggccagtgaagatgagcattttttcattgttcattggcagcataaatgtcttcttttgagaaatgtctgttcatatcctttgcccactttttgatggggttgtttggtttttttcctgtaaatttgtctgagttcattgtagattctggatattaaccctgtgtcagatgagtaggttgcaaaatttttctcccattctataggattcctgttcactctgatggtgttttctttagctgggcagaacctccttagtttaatgagatcccatttgtcaattgtgacttttgttgccattgctttaggtgttttagacatgaagtccttgcccatgcctatgtccagaatgctatggcctaggttttcttctagaaattttatgtgatgcgttattttgattaatgagtttggatactatgttgttgtagaatctgcaaggagatatttgtgagcgctttgaggcctttggtgaaaaaggaaataccttcacataataaatagacagaagttctctgagaaacctccctgtcatgtgtgcattcatctcacatagttgaaacagtcttttgactgaacagcttgaaaactgtcaatttgtagaatctgcaatgggatatttgtgagccctttgaggcctatggtgagaaaggaaatatcttcaataaaaactataaagaatgtttctgagaagctgttttgcaaggtttgccctcatctcagagagataaaagtatctattctttgatgagtctggaaactctgttcttgtaaaatctgcaaagggatatttgtgagtggcttgaggcctacggtaaaaaaggaaatgtcttcacataaaaactacacagaagatttcagagaaacttctttgtgatatatgcattcatctcacagagttgaaccattcttttgattgagaagtttggaaacagtcttttcagagaatctgcaaaaggatattttgagcgctttgttacgtatggtgaaaagggaaatatcttcacataaaaagtggacagaagcttttggagaaacttctttgtgatgtgtgcattcatctcacagatttgaacctttcttttgattgagcagtttgaaaagagtccttttctagaatctgcagagggatatttgtgagccctttatggcctaaggagaaataggaaatatcttcacataaaaactagacagaagcattctgagaaacttcttggtgacatgtgcatttataacacagagttgatcccttcttttgattaaacagtttggtaacagtctttttgtagtatctgtagagggatgtttgtgagcagtttgaggcctatggtgaacaaagaaatatcttcacataaaaactagacagaagctttctgagaaacttctttgtgatgtgtgaattaatctcagagtgttgaacctttctttggatggagcagtttgtaaacaatctttttgtagaatctgcaaaggtatatctctgagcccattgaggcctatggtgaaatatgaaatatcttcccataaaaactagacagaaggtttctaagaaacttctttgtgatgtgtgcttccatctcacagagttgaacctttcttttgattgagcagtttggaaaccacctttttgtagaatctgcaaatggatatttagagcgctttgaggcctatggtaaaaaaggaaatatcattacataaaaattcgacggaagcattctgagaaacttctttgtgaggttttcattcatctcacacagatgaacatttatttgattgaagatttgacaacagtatttttgtaaaatctacaaagggataattgtgaaccctttgaggcctatggtgaagtaggaaatatcttcacataaaaactacacagaaactttctgagaaactattttgtgatgcttgcattcatctcacaaagttgaacctttcctttgctagagcagtttggaaacagtcctattgtagaatccccaaagggatatttctcagctgattgaggtctttggtgatataggaaatatcttcacataaagctagacagaagctttctgagaaacttatttttaatgagtgctttcatctcaaagagttaagcatttcttttactgagcagtttggaaacactctttttgcataatctgcaaatggataattggagcgtttcgaggcctatggtgaaaaagcaaatatcttcacataaaaactaaacagaagctttctgagaaactactttgtaatgcgtgcattcatctcacagcgttgaaatcttcttttgattgaacagtttgtaaacagtctttttgtagaatctacaaatggatatttggagtgctttgaggcctatggtaaaaaaggaaatatcttcacaaaaaaactagaaagaaacattctgagaaacttctttgtgatatgtgctttcatctcacagagatgaacctttcctttcattgagcagcttggaaacagactttttatagaatctggaaatgcatatttggagcgctttgaggcctgcggtgaaaaaggaaatatcttcagataaacactaaacagaatctttctaagaaacttctttgtgatgcgtgcattcatatcatagagctgaaactttcttttgatttagcagtttgtaaacagtcttttggtagaatctgtgaatggctatttcgagcgtgttgaggcctatggtgaaaaaggaaatatcttcacaaaaaaactacaaatatacattctgagaaacttctttgtgatgtgtgctttcacttcacagagttgaaactttcttttgattgagctatttggaaacagtctttttgtggaatctgcaaatggatatttggagcactttgaggcctatggtgaaaaaggaaatacctcacatgaaccctagacagaagtattctgagaaacttctttgtcttgtgtccattcatctcacagagttgaacctttctttggattgagcagtttggaaacagtcttattgtagaatctgcaaaaaatatttttgagccctttatggcccatggtgaaacaggaaatattctcaaagaaaaactagacagaagctttctgagaaacttctttgtgatgcgtgctttcaacacatggagttgtacctttcttttgattgagcagtttggaaagggtctttttgtggaatcagcaaatggatgtttggagcgctttgaggcctatggtgaaaaagtaaataccttcacataaaaaacagacagaagcattgtgagaaacatctctgtgatgtgtgcattcatttcatacagttgaatctttctttgattgaggagtttagaaacagtctttttgtggaatcagcaaatggatgtttggagcactttgaggcttatggtgaaaaaggaaataccttcacataaaaaatagacagaaggattgtgagaaacatctatgtgatgtgtgcattcatctcatagagttgaacctttctttgattgagcagtttggaaacagtccttttgtaaaatctgcaaaggggtatttctgagcccattgaagcctagggtgaaaaagaaatgtcttcacataaaaattagatagaagcattctgataaacttttttgtggtgtgtccattcatctcgcagagttgaaactttctgtggattgagcagtttggaaacagcctttttgtagaatttacaaaaatatttgtgagcactatatggcccatggtgaaataggaaataccttcacacaaaaactagacagaagctttctgagaaactactttgtgatgtttgcttccgtgtcacagggttgaaactttcttttgattgagcagtttggaaacactctttttgtagaatctacaaatgggtatttggagtgctttgaggcctatagtgaaaaaagaaatattttcaccgaaaaactagatagatgtattctgcaaaacttctttgtgatgtgtgcattcatctcatagagttgaatctttctttggattcagcagttttctaaacagtccttttgtagaatctgcaaacggataattctgagcccactgagtcctatgctgaaaaaggaaatatcttcacataaaaacctaaaaactagacagaagcattctgagaaacctctttctggtgtgtgcattcatctcacagagttgaacctttctttagtttgaacagtttggaaacagtcttttttttgaatatgcaaatggatatttgtgagccctttacagcctatggtgaaataggaaatatcttcacataaaaaccagacagtagcattctgagaaacttctttgtgatgtgtgtattcatctcacagaattgaacatttctttggatgcagcagtttggaaacagtctttttgtagtatctgcagagggatattcatgagcagtttaaggcctatggttaaaaaggatatatcttcacagaaaacctcgacagatccattgtgagaaacttcttttagatgtgtgcattcatctcacagagttgaacctttctttggattgagcagttttctaaacagaccttttgtagaatctacaaagggatacttctgagcccgttgaggcctatggtgaaaaaggaaatatcttcacatgaaatcttaacagaagctttctgagaaacttctttgtgatgtgtgcattcatctcacagtgttgaaactttcttttgattgagcagtttggaaatagtctttttgtacaatctgcaaagggatattcctgagccatttgaggctattgtgagataaatatcttcatataaaaactagacaaaagcattctaagaaacttctttgtaatgtgtgcattcatcacacagagttgaaactttctttcgattgtgcagtttggagacagtatttttgtataatatgcaaaaggatatttttgagccctttcaggcctatggtgaaatagggaatatcttcacacacaaaaaaaaactagacagaagctttctgagaaaattctttgtgatgtgtgctttcgtcttacagagttgaacttttcttttgattgaacagtttggaaacattctttttgtagaatctgaagatggatatttgcagcatttcaggcctatggtgaacaggaaatgtcttcacataaaaactagagagaagcattctgagaaagttccttgtgatgtgtgcattcatgtcacagagttgaaactttccttggattgagcagtttggaaagagtccttttgtagaatctgcaaaaggatgtttgtgagcacattggagcctatggtgaaatgggaaatgtcttcacataaaaactagacagaagttttctgtaaaacttctttgtgctgtgtgctttcaccacaaggagttgaacctctcttttgattgagcagtttggaaacactctttttgtagaacttgcaaacggatatttgtagtgctttgaggcctatggtgaaaaagaaaatatctgcatataaaaactagtcggaaactttctgggaaactttctgagaaacttctttgtgatgtgtgctttcatctcacagagttggatcttgttttcattgagcagtttggcaacaagtcattttgtagaatctgaaaagtgatatttgtgagtggtttgaggcctatagtgaaaaagtaaatatcttcacctaaaacctagacagaagcattttgagaaaactctttgtgatgtttgcattcatctcactgagttgaacctttctattcattaagcagtgtggaatcttactttttgtgcgatctgcaaaggaatatttgtttgcagtttgagacctatggtgaaaaagtaatatcttcacataaaaactagacagtagcattctgagaaactaatttttttatgtgtgcattgatctcacagagttgaacctttcttttgatgaggcagttcagaaacagttttttgtagaatctgaaaagggatattttttatctctttgaggcctaaggtgaaatagaaaatatcttcacataaaaactagacagaaactttctgagaaacttctttgtgatgtaggctttcatctcatagatgtgaacctttattttgattgagcagtttggaaagagtcttttgtagtgtctgaagtgggctattagtgagtggactgaggcctatggtgaaaaaggaaatggcttctcaaaaaaagtatacagaagcattctgagagacttctttgtaatgtgcacattcatcttaaagtgttaaacatttcttttgattgagctttttggaaacactctttttgtagcatctgcaagtgtatacttctgagcccattgagacctattttgaaatatgaaatatcttcacataaaaactagatagaaggtttctaagaaactccttggtgaagtgtgctttcatctcacagagttgaaactttcttgtgattaagcagtttgaaaacactctttttgtagattctgcaagtggatatttggagcactttgagacccatggtgaaaaaggaaatatcttcacataaaaactaaacagaagttttctgagaaacttctttgtgatatgtgcattcatcacacagagttgaaccgttcttttgattgagcaatttggaaaaagtctttttgtagaatctgcaaatggatatttggagcactttgaggcctatggtgaaaaatgaaacttcttcatataaaacaagacaaaagcattctgagaaacttctttgtgatgtgtgacaaagtttagcctttcttttcatcgagcagtttggaagcagtctttttggagaatctgcaaagggatatttgttagtggtttgtggcctatggtgaaaaaggaaataccttcacataaaaaccagacagaagctttttgagaaacctctttatgatgtttgcattcatttcacagagtcgaatcttccttttcattgagcagtttggaaacagtctttttccacaatctgtaaagggatatttctgagtgatatttctgaatgaagaaatatcttcatataaaaattagacagaagtattctgggaaacttctttgtgatgtgtgcattcaaaccacagagttgaagctttcatttcattgagtagttcagaaatagtcttttcatacaatctgcaaagggatatttctgagacctttgaggcctatggtgaaataggaaatatctttacataaaaactagacagaagctttctgaggaacttctttgtgatgcgtgctttcatctcacagagttcaacctttttttttgatggagcagtttggatacagtcattttgtagaatctgcaaagggatatttctgagtcctttgagtcctatagtgaaatagggattatcttcacataataactagacagaagcattctgagaaacttccttgtgatgtgccctttcatttcacagagttgaacctttcctttgattgagcagtttggaaacactctttttgtagaacctgtaaacagatatttggagcgctttgaggcataaggtgaaaaaggaagaatctgcacacaataactagatagaaactttctgagaaacttcttcatgatgcgtgctttcatctcacagattcaaacctttcttttcattgagtagtttaggaacaagtcattttgtagaatctgcaaagttatatttgtgagctgtttgaggcctatggtgaaaaacaaaatatcttcacataaaaaccagacagaagatttttgagataaatctttgtgatgtttgcattcatctcaaagagttgaacttttctgttcattgaggagtttggaaactttctttttgtgcaaactgcaaaggagtgtttctgagtggtttgaggcctatggtgaaaaagaaataacttcacataaaaactagacacaagcattctgagaaacttcttttttatctgtgcattcacctcacagagttgaacctttcttttcattgagcagttcagaaacagtctttttgtagaatctgcaaagggatatttgtgatcccattgaggcctacagtgaaataggaaatatcttcacataaatactagacagaagctttctgagaaacatctttgtgatgtgtgctttcatcctacagagttgaacccttctgttgattgatcactttggaaacagtctttggaagaatctacaaatggatatttggagagctttgaggcctaggtttaaaaaggaaatatattcacataaaaagtagagggaagcattttgagaaacttctttgtgatgtgtgctttcatttcacagagttgaatcattattttggctgagcatcttggaaacagtctttttgtacaatctgcaaagggatatttgtgagccctttatggcctgtggtgaaatacgaaatatcttcacataaaaactagacagaagatttctgagaaacttctttgtgatgtgtgccttcatctcacagtgttgaacatttcttttgattgatcagtttggaaagtttttttgtagaatctgcaaatggatatttggagatatttgaggcctgtggtgaaaaaggaagtatcttaacataaaaactagacagaagatttctggaaaacttctttgtgatgtgtgaattcatgtcacagagatgaagctttcttctgattgagtagtttggaaacagtctttttgtagaatctgcaaagggttatttatgagcggtttgaggcctatggtgaaaaagggagtatcagcaaataaaaactagacagaaactttctgagaaacttctctgtgatgtgtgcattcatctcgcagagtggaagttttctttgattgagcagtttggaaacagtctttttgtagaatctgcaaagggatatatgtaggtggtttgaggtctatagtgaaaatggaaatatcttcacataaaaactaactgctcaatgggaagaaatttttacttctgtgtgataaatgcaaatgtcacaaaggagttactcagaaaacttctttctgcttttaatgtgaagatatttcctttttcaccatatgcctcaatgtgctcgcagatatccctttgcagattctacaaaaatactgtttccaaactgctcaataaacagaatggttcaaccctgtgagacgaatgtgcacatcacaaagaagtttctcagaaaactcccttctcatttttatgtgaagatatttccttttagaacataggcctaaatgcactcccaaatatacctttgcagaatctacaaaaagactgtttccaaactgctcaatcaaaagaaagtttcaactctgttagataaatgcacacatcaggaagtactttctcagcaagcttctcacaagtttttatgtgaagatatttcctttttcaatgtgggtcacaaagcactcaaaaaaatccctttgcagactctagaataacagagtttacaaactactcaatgaaaagaaatgtttacttctgtgagatgaatacacatatcttaaaacagcttctcagaatgcttatttctagtttttatgtgaagatatttcctttttcaccataggcttcaacttgctcctaaatatcactttgcagattctacaaaacgactgtttccaaactgctcattccaaagacaggttcagctctttgagatgaatgcacacaacacaaagaagtttctcagaatgcttctacctagtttttatgtgaagatatttccttttccaacagaggccttaaactgttctcacatatacctcttcagatactacaaaaagactgtttccagactgctccatcaaaagaaaagttcaactctgtgagataaatggatacatcacaaaaaattttctcagaatacttctgtctacattttatctgaagatatttctttttcaccataggcctctaacttcgcagaaatattcctttgcagattttacaaaaagactgtttccaaactgctcaatgaaaagaaagtttcacctctgtgagatgtatgcagtcatcaaaaggaagtttctcagaaagcttctgtttatatttcatgtgaagatatgtcctttttcaccataggcctcaaagtgcttgaagtatcatttgcagattctacaaaaagactgtttccaaactgctcaatcaaaaaaaaggttcaaacctgtgagatgaaagcacacatcattaagaagtttctcagaatgcttctgtctagtttttatatgaagatatttccttttccaccataggcctcaaagtgctccaaatatccacttgaacactctatgaaacagtttttcaaaagtgctcaataaaagaaagattcagctctgtgacatgaatgcacacagcacaaagaagtttctcagaatgcttgtgtctagtttttatgtgaagatgcttccttttccaccagaagcctcaaagcacttcaaatatacacttgcagatactgcaaaaagagtgtttcaaaactgctcaatcaatagaaagtttgaagtctgtgagatgaatgcacacatcacaaagaagtttctgagaatgcttctgccttgtttttatgagaagatatttcctttttcaccataggcctcaaagcactggtaatatccatttgcagatactacaaaaagactgttcccaaactgctcaataaaaagaaagtttcaactctaggagataaaagcaaatatcacaaagaagtttctcagaaactttctatctagtttttatgtgaacatatttcttatcaccccatagacctcaatcggctcacaagtatccttctgcagattgtaaaaaagtactgtttccaaaccgctcaatcacaggaaaggtttaactctgtgaaatgaatgcatccatcacagagaagtttctcagaatgcttcagtctcgttttcatgtgaagaagattccttttccaccatattcctcatgtgctccaaataaacacttgcagattccgctaaaagagtgtttcaaaactgctcaatcaaaagaaaggttctagtcggtgagatgaatgcacacatcacaaagaagtttctatgaatgtttctgtctgatttatattgaagatatttcctttttcaccgtaggcctcagagtgcttaaaatatccatttgcagatactagaaaagactgtttccaaactgctcaatcaaagtaaagttcaactcagtgagatgaatgcacacatcaccaagacgtttctgagaaagattctgtctcgtttttatgtgaagatatttcctgtttccccagaggcatcaatgggctcacaaatattcctttgcatattctacaaaatgactgttcagaaggtgctcaatcaaaaaaaaagttcaacagtgtgagatgaatgcgcccattcaaaggaagtttctcagaattcttctatctagtttttatgtgaagatatttcctttttcactataggccacaaagtgctccaaatatccacttgcagactctacaaaacgagtgtatccacactgctcaatcaaaagaaaatttcaactgtgtgagatgaatgcacacatcaaaataaatttctccaaaacttctgcctactttttatgggaagatatttcgtttttcaacgtaggccaaaagcactccaaatatcaatttgcagattctacaaaaagactgtttccaaactgctcaatcaagagaaagtttcaacccggtgagtagaagtcacacatgacaaaatagtttctcagaaagtatctgtctagtttttatgtgaagatatttcctatcaccccagaagcctcaatgggctcacaaatattcctttgcagattctacaaaacgacagtttcaaaactgctgaatcaaaagaaaggttcaactctgtgagatgaatgcacagatcacaaataagtttctcagaatgctgctgtctagtttttatgggaagataattccttttccaccataggcctcaaagctctccaaatagccatttgcagatactgtaaaaagactgtttccaaactgctgaatcaaaagaaaggttgaactccatgagttgaatgcacacgtcacaaagaagtttctcagaatggttctgactagtttttatgtgaagatattttcttttccaccataggcctcaaagcgctgaaaatatccacttgaagattctacagaaagagagtttcaaaactgctcaaacaaaagaaagattcaactccgtgagatgaatgcacacatcacaaagaagtttctcagaatgcttctgtctagttttatgtaaagatatttccttttctactataggccacaaagcactccaaatatcaacttgcagattctgcagaaagagattttcaaagctgctcaatcaaaagaaaagttcaactctttgagatgaatgcacacatcatgaagttcctcagaatgcttctatttttatgtgaagatatatccttttctaccatagaccacaaaacgctccaaatatccccttgcagtttctactaaaagagtgtttccaaacggctcaatcaaaagaaagtttcaactctgtgagatgaatgcacacatcattaagaagtttctcagtaattttctgtctagtttttatgtgaagatatttcctttcctactataggcatgaaagtgctgcaaatatccgtttgcagatactgcaaaaagactgtttccacactgctcaatcaaaggaaatgtccaactctttgagttgaatgcatgcatctcgaagagattacttataatgattctgtctagttttgatgtgaagatatttgcttttccaccagtggcctcaaattctccaaatatccacttgcagattctacaataagagtgtttcaaaactgctcaatcaaaagaaaggttcaacactgtgagatgaatgcacacgtcacaaagcactttcttagaatgcttctgtctagcttttatgtgaagatatttcctttttcaccataggctgtaaagcactccaaatatccctttcagattctacagaaagagtatttcaaaactgttcaatcaaaagagaaactcaactctggtgatgaatgcacgcatcacaaagcagtttctcataatgtttctgtctagtttttatgtgaagatatttccttttccactataggccgtaatgcactcctaatatccacttgcagattctacagaaagactgtttgcaaactgctcaaacaaaagaaaagttcaactctgtgagttgaatgagcacatcacaaagaagtttctcagaatgcttctgtctagtttttatgtgaatatatttccttttccactatacgccgtcatgcgctccaaatatccacttgcagattctacaaaaagactgattccaaactgctcaatcaaaagaaaagctcaactctgtgaattgaatgagcacatcacaaagaagtttctcagaatgcttctatctagtttttatgtgaatatatttccttttccaccacaggccacaaacactccaaatatccacttgaagattctacaaaaagagtgcttcaaaaatgctcaatcaaaagaaaggttcaactctttgagatggatgcacacatcacaaagaagcttctcagaatgtttctgtctagtttttttgtgaagatatttccttttccaccgtagtcctcaagtctctccaaatatctactttcagaatctccaaaaagagtgttttaaaactgctgtaccaaagaaagtttcatgtctgagatatgactgcatacaacacagagaagtttctcaaagtgcttctgtttattttttttatgaagatatttccttttccactatgggccacagagcgctccaaatatcgacttgcagattctacaaaaagagtgtttcaaaactgctcaatcaatagaaagtttgaagtctgtgagatgaatgcacacatcacaaaggagtttctaagaatgcttccatctgaattttatgtgaggatatttcctttttcaccataggcctcagtacactccaaatatccatttacagataatacaaatgactgtatccaaactgctcaatcaaaagaaagttcaactgtgtatgatgaaggcacacatcacaaggctgtttctcagaaagattttgtctagtttttaggtgaagatatttcttatttccccagaggcctcaattggctctcaaatattccctttcatattctactaaatgactgtatcgaagctgctcaatcaaaagacgggtttaacagtgtgagacgaaaatacaccttcctaggaagtttctcagaattcttctttctagttttttatgtgaagatatttccttttccactataggcctcaaagcgttccaaatatccacttgcagataccacaaatagagcgtttcaaaactgctcaatcaaaagaaatgttcaactctgtgagatgaatgcagacatcaaaaagaagtttctcagaatgcttccgccttgtttttatgtgaagatatttcctttttcaccataggcctcaaagcactggtaatatccatttgcagatattacaaaaagactgctcccaaactgctcaataaaaagaaagtttcaactctaggagataaaagcaaatatcacaaagaagtttctcagaaactttctatctagtttttatgtgaacatatttcttatcaccccatagacctcaatcggctcacaagtatccttctgcagattgtaaaaaactactgtttccaaaccgctcaatcacaggaaaggtttaactctgtgaaatgaatgcatccatcacagagaagtttctcagaatgcttccgtctcgttttcatgtgaagaagattccttttccaccatattcctcatgcgctccaaataaacacttgcagattccgctaaaagagtgtttcaaaactgctcaatcaaaagaaaggttctagtcggtgagatgaatgcacacatcacaaagaagtttctatgaatgcttctgtctgatttatattgaagatatttcctttttcaccgtaggcctcagagtgcttaaaatatccatttgcagatactagaaaagacactttccaaactgctcaatcaaaataaagttcaactcagtgagatgaatgcaaacatgaccaagacgtttctgagaaagattctgtctcgtttttatgtgaagatatttcctgtttccccagaggcatcaatgggctcacaaatattcctttgtaaattctacaaaatgactctttagaaggtgctcaatcaaaaaaaaagttcaacagtgtgagatgaatgcgcccattcaaaggaagtttctcagaattcttctatctagtttttatgtgaagatatttcctttttcactataggccacaaagtgctccaaatatccacttgtagaccctacaaaacgagtgtatccacactgccctatcaaaagaaaatttcaactgtgtgagatgaatgcacacatctaaataaatttttacaaaacttctgcctactttttaggggaagatatttcgtttttcaacgtaggccaaaagcactccaaatatcaatttgcagattctacaaaaagactgtttccaaactgctcaatcaagagaaagtttcaacccggtgagtagaagtcacacatgacaaaatagtttctcaggaagtatctgtctagtttttatgtgaagatatttcctatcaccccagaagcctcaatgggctcacaaatattcctttgcagattctacaaaacgacagtttcaaaactgctgaatcaaaagaaaggttcaactctgtgagatgaatgcacagatcacaaataagtttctcagaatgctgctgtctagtttttatgggaagagatttccttttccaccataggcctcaaagctctccaaatagccatttgcagatactgtaaaaagactgtttccaaactgctgaatcaaaagaaaggttgaactccatgagttgaatgcacacgtcacaaagaagtttctcagaatgcttctgactagtttttatgtgaagataatttcttttccaccataggcctcaaagcgctgaaaatatccacttgaagattctacagaaagagtttcaaaactgctcaaacaaaagaaagattcaactctgtgagatgaatgcacacatcacaaagaagtttctcagaatgcttctgtctagttttatgtaaagatatttccttttctactgtaggccacaaagcactccaaatatcaacttgcagattctgcagaaagagattttcaaagctgctcaatcaaaagaaaagttcaactctttgagatgaatgcacacatcatgaagttcctcagaatgcttctatttttatgtgaagatatatccttttctaccatagaccacaaaacgctccaaatatccccttgcagtttctactaaaagagtgtttccaaacagctcaatggaaagaaagtttcaactctgtgagatgaatgcacacatcattaaggagtttctcagtaattttctgtctagtttttatgtgaagatatttcctttcctactataggcctgaaagtgctgcaaatatccgtttgcagatactgcaaaaagactgtttccacactgctcaatcaaagaaatgtccaactctgtgagttgaatgcacgcatctcaaagagattacttataatgattctgtctagttttgatgtgaagatatttgcttttccaccagtggcctcaaactctgcaaatatccacttgcagattctacaataagagtgtttcaaaactgctcaatcaaaagaaaggttcaacactgtgagatgaatgcacacgtcacaatgcactttcttagaatgcttctgtctagcttttatgggaagatgtttccttttacaccataggctgcaaagcgctccaaatatccctttcagattctacagaaagagtgtttcaaaactcttcaatcaaaagagaaactcaactctggtgatgaatgcacgcatcacaaagcagtttctcataatgtttctgtctagtttttatgtgaagatatttcattctccactataggccgtaatgcactcctaatatccacttgcagattctacaaaaagactgtttgcaaactgctcaaacaaaagaaaagatcaactctgtgagttgaatgagcacatcacaaagaggtttctctgaatgcttctgtctagtttttatgtgaatatatttccttttccactataggccgtaatgcactcctaatatccacttgcagattctacaaaaagactgtttccaaactgctcaatcaaaagaaaagctcaactctgtgagttgtatgagcacatcacaaagaagtttctcagaatgcttctatctagtttttatgtgaatatatttccttttccaccagaggccacaaacactccaaatatccacttgaagattctacaaaaaaagtgcttcaaaaatgctcaatcaaaagaaaggttcaactcttcgagatggacgcacacatcacaaagaagcttctcagaatgtttctgtctagtttttttgtgaagatatttccttttctaacgtagtcctcaagtctctccaaatatctactttcagaatctccaaaaagagtgttttaaaactgctgtaccaaagaaagcttcatgtctgagatatgactgcatacaacacagagaactttctcaaagtgcttctgtttatttttcttatgaagatatttccttttccactatgggccacagagcgctccaaatatccactggcagattctacaaaagagtgtttcaaaactgctcaatcaatagaaagtttgaagtctgtgagatgaatgtacacatcacaaaggagtttctaagaatgcttccatctggattttatgtgaggatatttcctttttcaccataggcctcaatacactccaaatatccatttacagataatacaaatgactgtatccaaactgctcaatcaaaagaaagttcaactgtgcatgatgaatgcacacatcacaagggtgtttctcagaaagaatttgtcttgtttttaggtgaagatatttcttatttccccagaggcctcaatgggctctcaaatattacctttcatattctactaaatgactgtatcgaagctgctcaatcaaaagacgggtttaacagtgtgagacgaaaatacaccttcctaggaagtttctcagaattcttctttctagttttttatgtgaagatatttccttttccactataggcctcaaagcgttccaaatatccacttgcagatactacaaatagagcgtttcaaaactgctcaatcaaaagaaaggttcaactctgtgagatgaatgcatacatcaaaaagaagtttctcagaatgcttccgccttgtttttatgtgaagatatttcctttttcaccataggcctcaaagcactggtaatatccatttgcagatactacaaaaagactgttcccaaactgctcaataaaaagaaagtttcaactctaggagataaaagcaaatatcacaaagaagtttctcagaaactttctatctagtttttatgtgaacatatttcttatcaccccatagacctcaatcggctcacaagtatccttctgcagattgtaaaaaactactgtttccaaaccgctcaatcacaggaaaggtttaactctgtgaaatgaatgcatccatcacagagaagtttctcagaatgcttccgtctcgttttcatgtgaagaagattccttttccaccatattcctcatgcgctccaaataaacacttgcagattccgctaaaagagtgtttcaaaactgctcaaccaaaagaaaggttctagtcggtgagatgaatgcacacatcacaaagaagtttctatgaatgcttctgtctgatttatattgaagatatttcctttttcaccgtaggcctcagagtgcttaaaatatccatttgcagatactagaaaagactgtttccaaactgctcaatcaaaataaagttcaactcagtgagatgaatgcacacatcaccaagacgtttctgagaaagattctgtctcgtttttatgtgaagatatttcctgtttccccagaggcatcaatgggctcacaaatattcctttgcatattctacaaaatgactgtttagaaggtgctcaatcaaaaaaaaagttcaacagtgtgagatgaatgcgcccattcaaaggaagtttctcagaattcttctatctagtttttatgtgaagatatttcctttttcactataggccacaaagtgctccaaatatccacttgcagactctacgaaacgagtgtatccacactgctcaatcaaaagaaaatttcaactgtgtgagatgaatgcacacatcaaaataaatttctccaaaacttctgcctactttttatgggaagatatttcgtttttcaacgtaggccaaaagcactccaaatatcaatttgcagattctacaaaaagactgtttccaaactgctcaatcaacagaaagtttcaacccggtgagtagaagtcacacatgacaaaatagtttctcagaaagtatctgtctagtttttacgtgaagatatttcctatcaccccagaagcctcaatgggctcacaatattcctttgcagattctacaaaacgacagtttcaaaactgctgaatcaaaagaaaggttcaactctgggagatgaatgcacagatcacaaataagtttctcagaatgctgctgtctagttttaatgggaagagatttccttttccaccataggcctcaaagctctccaaatagccatttgcagatactgtaaaaagactgtttccaaactgctgaatcaaaagaaaggttgaactccatgagttgaatgcacacgtcataaagaagtttctcagaatggttctgactagtttttatgtgaagatattttcttttccaccataggcctcaaagcgctgaaaatattcacttgaagattctacagaaagagagtttcaaaactgctcaaacaaaagaaagattcaactctgtgagatgaatgcacacatcacaaagaagtttctcagaatgcttctgtctagttttatgtaaagatatttccttttctactataggccacaaagcactccaaatatcaacttgcagattctgcagaaagagtttttcaaagctgctcaatcaaaagaaaagttcaactctttgagatgaatgcacacatcatgaagttcctcagaatgcttctatttttatgtgaacatatccttttctaccatagaccacaaaacgctccaaatatccccttgcagtttctactaaaagagtgtttccaaacggctcaatcaaaagaaagtttcaacgctgtgagatgaatgcacacatcattaagaagtgtctcagtaattttctgtctagtttttatgtgaagatatttcctttcctactataggcctgaaagtgctgcaaatatccgtttgcagatactgcaaaaagactgtttccacactgctcaatcaaaggaaatgtccaactctgtgagttgaatgcacgcatctcaaagagattacttataatgattctgtctagttttgatgtgaagatatttgcttttccaccagtggcctcaaactctccaaatatccacttgcagattctacaataagagtgtttcaaaactgctcaatcaaaagaaaggttcaacactgtgagatgaatgcacacgtcacaaagcactttcttagaatgcttctgtctagcttttatgtgaagatatttcctttttcaccataggctgcaaagcgctccaaatatccctttcagattctacagaaagagtatttcaaaactgttcaatcaaaagagaaactcaactctggtgatgaatgcacgcatcacaaagcagtttctcataatgtttctgtctagtttttatgtgaagatatttcattctccactataggccgtaatgcactcctaatatccacttgcagattctacaaaaagactgtttgcaaactgctcaaacaaaagaaaagttcaactctgtgagttgaatgagcacatcacaaagaagtttctcagaatgcttctgtctagtttttatgtgaatatatttccttttccactataggctgtcatgcgctccaaatatccacttgcagattctacaaaaagactgtttccaaactgctcaatcaaaagaaaagctcaactctgtgagttgaatgagcacatcacaaagaagtttctcagaatgcttctgtctagttttcatgtgaatatatttccttttccactataggccgtcatgcgctccaaatatccactggcagattctacaaaaagactgtttccaaactgctcaatcaaaagaaaatctcaactctgtgagttgaatgagcacatcacaaaaaagtttctcagaatgcttctatctagtttttatgtgaatatatttccttttccaccacaggccacaaaccctccaaatatccacttgaagattctacaaaaagagtgcttcaaaaatgctcaatcaaaagaaaggttcaactcttcgatatggacgcacacatcacaaagaagcttctcagaatgtttctgtctagtttttttgtgaagatatttccttttccaccgtagtcctcaagtctctccaaatatctactttcagaatctccaaaaagagtgtttcaaaactgctgtaccaaagaaagtttcatgtctgatttatgactgcatacaacacagagaactttctcaaagtgcttctgtttatttttcttatgaagatatttccttttccactatgggccacagagcgctccaaatatccactggcagattctacaaaaagagtgtttcaaaactgctcaatcaatagaaagtttgaagtctgtgagatgaatgtacacatcacaaaggagtttctaagaatgcttccatctgaattttatgtgaggatatttcctttctcaccataggcctcagtacactccaaacatccatttacagataatacaaatgactgtatccaaactgctcaatcaaaagaaagttcaactgtgtatgatgaatgcacacatcacaagggtgtttctcagaaagattttgtctagtttttaggtgaagatatttcttatttccccagaggcctcaatgggctctcaaatattccctttcatattctactaaatggctgtatcgaagctgctcaatcaaaagacgggtttaacagtgtgagacgaaaatacaccttcctaggaagtttctcagaattcttctttctagttttttatgtgaagatatttccttttccactataggcctcaaagcgttccaaatatccacttgcagatactacaaatagagcttctcaaaactgctcaatcaaaagaaaggttcaactctgagagatgaatgcagacatcaaatataagtttctcagaatgcttctgccttgtttttatgtgaagatatttccttttccaccataggcctcaaagcactggtaatatccatttgtagatactacaaaaagactgttcccaaacttctcaataaaaagaaagtttcaactctaggagataaaagcaaatatcacaaagaagtttctcagaaactttctatctagtttttatgtgaacatatttcttatcaccccatagacctcaatcggctcacaagtatccttctgcagattgtaaaaaactactgtttccaaaccgctcaatcacaggaaaggtttaactctgtgaaatgaatgcatccatcacagagaagtttctcagaatgcttccgtctcgttttcatgtgaagaagattccttttccaccatattcctcatgcgctccaaataaacacttgcagattccgctaaaagagtgtttcaaaactgctcaatcaaaagaaaggttctagtcggtgagatgaatgcacacatcacaaagaagtttctatgaatgcttctgtctgatttatattgaagatatttcctttttcaccgtaggcctcagagtgcttaaaatatccatttgcagatactagaaaagactgtttccaaactgctcaatcaaaataaagttcaactcagtgagatgaatgcacacatcaccaagacgtttctgagaaagattctgtctcgtttttatgtgaagatatttcctgtttccccagaggcatcaatgggctcacaaatattcctttgcatattctacaaaatgactgtttagaaggtgctcaatcaaaaaaaaagttcaacagtgtgagatgaatgcgcccattcaaaggaagtttctcagaattcttctatctagtttttatgtgaagatatttcctttttcactataggccacaaagtgctccaaatatccacttgcagactctacgaaacgagtgtatccacactgctcaatcaaaagaaaatttcaactgtgtgagatgaatgcacacatcaaaataaatttctccaaaacttctgcctactttttatgggaagatatttcgtttttcaacgtaggccaaaagcgctccaaatatcaatttgcagattctacaaaaagactgtttccaaactgctcaatcaacagaaagtttcaacccggtgagtagaagtcacacatgacaaaatagtttctcagaaagtatctgtctagtttttacgtgaagatatttcctatcaccccagaagcctcaatgggctcacaatattcctttgcagattctacaaaacgacagtttcaaaactgctgaatcaaaagaaaggttcaactctgggagatgaatgcacagatcacaaataagtttctcagaatgctgctgtctagttttaatgggaagagatttccttttccaccatagacctcaaagctctccaaatagccatttgcagatactgtaaaaagactgtttccaaactgctgaatcaaaagaaaggttgaactccatgagttgaatgcacacgtcataaagaagtttctcagaatggttctgactagtttttatgtgaagatattttcttttccaccataggcctcaaagcgctgaaaatattcacttgaagattctacagaaagagagtttcaaaactgctcaaacaaaagaaagattcaactctgtgagatgaatgcacacatcacaaagaagtttctcagaatgcttctgtctagttttatgtaaagatatttccttttctactataggccacaaagcactccaaatatcaacttgcagattctgcagaaagagtttttcaaagctgctcaatcaaaagaaaagttcaactctttgagatgaatgcacacatcatgaagttcctcagaatgcttctatttttatgtgaacatatccttttctaccatagaccacaaaacgctccaaatatccccttgcagtttctactaaaagagtgtttccaaacggctcaatcaaaagaaagtttcaacgctgtgagatgaatgcacacatcattaagaagtgtctcagtaattttctgtctagtttttatgtgaagatatttcctttcctactataggcctgaaagtgctgcaaatatccgtttgcagatactgcaaaaagactgtttccacactgctcaatcaaaggaaatgtccaactctgtgagttgaatgcacgcatctcaaagagattacttataatgattctgtctagttttgatgtgaagatatttgcttttccaccagtggcctcaaactctccaaatatccacttgcagattctacaataagagtgtttcaaaactgctcaatcaaaagaaaggttcaacactgtgagatgaatgcacacgtcacaaagcactttcttagaatgcttctgtctagcttttatgtgaagatatttcctttttcaccataggctgcaaagcgctccaaatatccctttcagattctacagaaagagtatttcaaaactgttcaatcaaaagagaaactcaactctggtgatgaatgcacgcatcacaaagcagtttctcataatgtttctgtctagtttttatgtgaagatatttcattctccactataggccgtaatgcactcctaatatccacttgcagattctacaaaaagactgtttgcaaactgctcaaacaaaagaaaagttcaactctgtgagttgaatgagcacatcacaaagaagtttctcagaatgcttctgtctagtttttatgtgaatatatttccttttccactataggctgtcatgcgctccaaatatccacttgcagattctacaaaaagactgtttccaaactgctcaatcaaaagaaaagctcaactctgtgagttgaatgagcacatcacaaagaagtttctcagaatgcttctgtctagttttcatgtgaatatatttccttttccactataggccgtcatgcgctccaaatatccactggcagattctacaaaaagactgtttccaaactgctcaatcaaaagaaaatctcaactctgtgagttgaatgagcacatcacaaaaaagtttctcagaatgcttctatctagtttttatgtgaatatatttccttttccaccacaggccacaaaccctccaaatatccacttgaagattctacaaaaagagtgcttcaaaaatgctcaatcaaaagaaaggttcaactcttcgatatggacgcacacatcacaaagaagcttctcagaatgtttctgtctagtttttttgtgaagatatttccttttccaccgtagtcctcaagtctctccaaatatctactttcagaatctccaaaaagagtgtttcaaaactgctgtaccaaagaaagtttcatgtctgatttatgactgcatacaacacagagaactttctcaaagtgcttctgtttatttttcttatgaagatatttccttttccactatgggccacagagcgctccaaatatccactggcagattctacaaaaagagtgtttcaaaactgctcaatcaatagaaagtttgaagtctgtgagatgaatgtacacatcacaaaggagtttctaagaatgcttccatctgaattttatgtgaggatatttcctttctcaccataggcctcagtacactccaaacatccatttacagataatacaaatgactgtatccaaactgctcaatcaaaagaaagttcaactgtgtatgatgaatgcacacatcacaagggtgtttctcagaaagattttgtctagtttttaggtgaagatatttcttatttccccagaggcctcaatgggctctcaaatattccctttcatattctactaaatggctgtatcgaagctgctcaatcaaaagacgggtttaacagtgtgagacgaaaatacaccttcctaggaagtttctcagaattcttctttctagttttttatgtgaagatatttccttttccactataggcctcaaagcgttccaaatatccacttgcagatactacaaatagagcttctcaaaactgctcaatcaaaagaaaggttcaactctgagagatgaatgcagacatcaaatataagtttctcagaatgcttctgccttgtttttatgtgaagatatttcctttttcaccataggcctcaaagcactggtaatatccatttgtagatactacaaaaagactgttcccaaacttctcaataaaaagaaagtttcaactctaggagataaaagcaaatatcacaaagaagtttctcagaaactttctatctagtttttatgtgaacatatttcttatcaccccatagacctcaatcggctcacaagtatccttctgcagattgtaaaaaactactgtttccaaaccgctcaatcacaggaaaggtttaactctgtgaaatgaatgcatccatcacagagaagtttctcagaatgcttccgtctcgttttcatgtgaagaagattccttttccaccatattcctcatgcgctccaaataaacacttgcagattccgctaaaagagtgtttcaaaactgctcaatcaaaagaaaggttctagtcggtgagatgaatgcacacatcacaaagaagtttctatgaatgcttctgtctgatttatattgaagatatttcctttttcaccgtaggcctcagagtgcttaaaatatccatttgcagatactagaaaagactgtttccaaactgctcaatcaaagtaaagttcaactcagtgagatgaatgcacacatcaccaagacgtttctgagaaagattctgtctcgtttttatgtgaagatatttcctgtttccccagaggcatcaatgggctcacaaatattcctttgcatattctacaaaatgactgtttagaaggtgctcaatcaaaaaaaaagttcaacagtgtgagatgaatgcgcccattcaaaggaagtttctcagaattcttctatctagtttttatgtgaagatatttcctttttcactataggccacaaagtgctccaaatatccacttgcagactctacgaaacgagtgtatccacactgctcaatcaaaagaaaatttcaactgtttgagatgaatgcacacatcaaaataaatttctccaaaacttctgcctactttttatgggaagatatttcgtttttcaacgtaggccaaaagcactccaaatatcaatttgcagattctacaaaaagactgtttccaaactgctcaatcaacagaaagtttcaacccggtgagtagaagtcacacatgacaaaatagtttctcagaaagtatctgtctagtttttacgtgaagatatttcctatcaccccagaagcctcaatgggctcacaaatattcctttgcagattctacaaaaaggcagtttcaaaactgctgaatcaaaagaaaggttcaactctgggagatgaatgcacagatcacaaataagtttctcagaatgctgctgtctagttttaatgggaagagatttccttttccaccataggcctcaaagctctccaaatagccatttgcagatactgtaaaaagactgtttccaaactgctgaatcaaaagaaaggttgaactccatgagttgaatgcacacgtcataaagaagtttctcagaatggttctgactagtttttatgtgaagatattttcttttccaccataggcctcaaagcgctgaaaatattcacttgaagattctacagaaagagagtttcaaaactgctcaaacaaaagaaagattcaactctgtgagatgaatgcacacatcacaaagaagtttctcagaatgcttctgtctagttttatgtaaagatatttccttttctactataggccacaaagcactccaaatatcaacttgcagattctgcagaaagagtttttcaaagctgctcaatcaaaagaaaagttcaactctttgagatgaatgcacacatcatgaagttcctcagaatgcttctatttttatgtgaacatatccttttctaccatagaccacaaaacgctccaaatatccccttgcagtttctactaaaagagtgtttccaaacggctcaatcaaaagaaagtttcaacgctgtgagatgaatgcacacatcattaagaagtgtctcagtaattttctgtctagtttttatgtgaagatatttcctttcctactataggcctgaaagtgctgcaaatatccgtttgcagatactgcaaaaagactgtttccacactgctcaatcaaaggaaatgtccaactctgtgagttgaatgcacgcatctcaaagagattacttataatgattctgtctagttttgatgtgaagatatttgcttttccaccagtggcctcaaactctccaaatatccacttgcagattctacaataagagtgtttcaaaactgctcaatcaaaagaaaggttcaacactgtgagatgaatgcacacgtcacaaagcactttcttagaatgcttctgtctagcttttatgtgaagatatttccgttttcaccataggctgcaaagcgctccaaatatccctttcagattctacagaaagagtatttcaaaactgttcaatcaaaagagaaactcaactctggtgatgaatgcacgcatcacaaagcagtttctcataatgtttctgtctagtttttatgtgaagatatttcattctccactataggccgtaatgcactcctaatatccacttgcagattctacaaaaagactgtttgcaaactgctcaaacaaaagaaaagttcaactctgtgagttgaatgagcacatcacaaagaagtttctcagaatgcttctgtctagtttgtatgtgaatatatttccttttccactataggccgtcatgcgctccaaatatccacttgcagattctacaaaaagactgtttccaaactgctcaatcaaaagaaaagctcaactctgtgagttgaatgagcacatcacaaagaagtttctcagaatgcttctgtctagttttcatgtgaatatatttccttttccactataggccgtcatgcgctccaaatatccactggcagattctacaaaaagactgtttccaaactgctcaatcaaaagaaaatctcaactctgtgagttgaatgagcacatcacaaaaaagtttctcagaatgcttctatctagtttttatgtgaatatatttccttttccaccacaggccacaaaccctccaaatatccacttgaagattctacaaaaagagtgcttcaaaaatgctcaatcaaaagaaaggttcaactcttcgatatggacgcacacatcacaaagaagcttctcagaatgtttctgtctagtttttttgtgaagatatttccttttccaccgtagtcctcaagtctctccaaatatctactttcagaatctccaaaaagagtgtttcaaaactgctgtaccaaagaaagtttcatgtctgatttatgactgcatacaacacagagaactttctcaaagtgcttctgtttatttttcttatgaagatatttccttttccactatgggccacagagcgctccaaatatccactggcagattctacaaaaagagtgtttcaaaactgctcaatcaatagaaagtttgaagtctgtgagatgaatgtacacatcacaaaggagtttctaagaatgcttccatctgaattttatgtgaggatatttcctttctcaccataggcctcagtacactccaaacatccatttacagataatacaaatgactgtatccaaactgctcaatcaaaagaaagttcaactgtgtatgatgaatgcacacatcacaagggtgtttctcagaaagattttgtctagtttttaggtgaagatatttcttatttccccagaggcctcaatgggctctcaaatattccctttcatattctactaaatggctgtatcgaagctgctcaatcaaaagacgggtttaacagtgtgagacgaaaatacaccttcctaggaagtttctcagaattcttctttctagttttttatgtgaagatatttccttttccactataggcctcaaagcgttccaaatatccacttgcagatactacaaatagagcttctcaaaactgctcaatcaaaagaaaggttcaactctgagagatgaatgcagacatcaaatataagtttctcagaatgcttctgccttgtttttatgtgaagatatttccttttccaccataggcctcaaagcactggtaatatccatttgtagatactacaaaaagactgttcccaaacttctcaataaaaagaaagtttcaactctaggagataaaagcaaatatcacaaagaagtttctcagaaactttctatctagtttttatgtgaacatatttcttatcaccccatagacctcaatcggctcacaagtatccttctgcagattgtaaaaaactactgtttccaaaccgctcaatcacaggaaaggtttaactctgtgaaatgaatgcatccatcacagagaagtttctcagaatgcttccgtctcgttttcatgtgaagaagattccttttccaccatattcctcatgcgctccaaataaacacttgcagattccgctaaaagagtgtttcaaaactgctcaatcaaaagaaaggttctagtcggtgagatgaatgcacacatcacaaagaagtttctatgaatgcttctgtctgatttatattgaagatatttcctttttcactgtaggcctcagagtgcttaaaatatccatttgcagatactagaaaagactgtttccaaactgctcaatcaaaataaagttcaactcagtgagatgaatgcacacatcaccaagacgtttctgagaaagattctgtctcgtttttatgtgaagatatttcctgtttccccagaggcatcaatgggctcacaaatattcctttgcatattctacaaaatgactgtttagaaggtgctcaatgaaaaaaaaagttcaacagtgtgagatgaatgcgcccattcaaaggaagtttctcagaattcttctatctagtttttatgtgaagatatttcctttttcactataggccacaaagtgctccaaatatccacttgcagactctacgaaacgagtgtatccacactgctcaaacaaaagaaaatttcaactgtttgagatgaatgcacacatcaaaataaatttctccaaaacttctgcctactttttatgggaagatatttcgtttttcaacgtaggccaaaagcactccaaatatcaatttgcagattctacaaaaagactgtttccaaactgctcaatcaacagaaagtttcaacccggtgagtagaagtcacacatgacaaaatagtttctcagaaagtatctgtctagtttttacgtgaagatatttcctatcaccccagaagcctcaatgggctcacaaatattcctttgcagattctacaaaaaggcagtttcaaaactgctgaatcaaaagaaaggttcgactctgggagatgaatgcacagatcacaaataagtttctcagaatgctgctgcctagttttaatgggaagagatttccttttccaccataggcctcaaagctctccaaatagccatttgcagatactgtaaaaagactgtttccaaactgctgaatcaaaagaaaggttgaactccatgagttgaatgcacacgtcataaagaagtttctcagaatggttctgactagtttttatgtgaagatattttcttttccaccataggcctcaaagcgctgaaaatatccacttgaagattctacagaaagagagtttcaaaactgctcaaacaaaagaaagattcaactctgtgagatgaatgcacacatcacaaagaagtttctcagaatgcttctgtctagttttatgtaaagatatttccttttctactataggccacaaagcactccaaatatcaacttgcagattctgcagaaagagtttttcaaagctgctcagtcaaaagacaagttcaactctttgagatgaatgcacacatcatgaagttcctcagaatgcttctatttttatgtgaagatatatccttttctaccatagaccacaaaacgctccaaatatccccttgcagtttctactaaaagagtgtttccaaacggctcaatcaaaagaaagtttcaactctgtgagatgaatgcacacaacattaagtagtgtctcagtaattttctgtctagtttttatgtgaagatatttcctttcctactataggcctgaaagtgctgcaaatatccgtttgcagatactgcaaaaagactgtttccacactgctcaatcaaaggaaatgtccaactctgtgagttgaatgcacgcatctcaaagagattacttctaatgattctgtctagttttgatgtgaagatatttgcttttccaccagtggcctcaaactctccaaatatccacttgcagattctacaataagagtgtttcaaaactgctcaatcaaagaaaggttcaacactgtgagatgaatgcacacgtcacaaagcactttcttagaatgcttctgtctagcttttatgtgaagatatttcctttttcaccataggctgcaaagcgctccaaatatccctttcagattctacagaaagagtatttcaaaactgttcaatcaaaagagaaactcaactctggtgatgaatgcacgcatcacaaagcagtttctcataatgtttctgtctagtttttatgtgaagatatttcattctccactataggccgtaatgcactcctaatatccacttgcagattctacaaaaagactgtttgcaaactgctcaaacaaaagaaaagttcaactctgtgagttgaatgagcacatcacaaagaagtttctcagaatgcttctgtctagtttttatgtgaatatatttccttttccactataggccatcatgcgctccaaatatccacttgcagattctacaaaaagactgtttccaaactgctcaatcaaaagaaaagctcaactctgtgagttcaatgagcacatcacaaagaagtttctcagaatgcttctatctagtttttatgtgaatatatttccttttccaccacaggccacaaaccctccaaatatccacttgaagattctacaaaaagagtgcttcaaaaatgctcaatcaaaagaaaggttcaactcttcgagatggatgcacacatcacaaagaagcttctcagaatgtttctgtctagtttttttgtgaagatatttccttttccaccgtagtcctcaagtctctccaaatatctactttcagaatctccaaaaagagtgttttaaaactgctgtaccaaagaaagtttcatgtctgagatatgactgcatacaacacagagaagtttctcaaagtgcttctgtttattttttttatgaagataattccttttccactatgggccacagagcgctccaaatatcgacttgcagattctacaaaaagagtgtttcaaaactgctcaatcaatagaaagtttgaagtctgtgagatgaatgcacacaccacaaaggagtttctaagaatgcttccatctgaattttatgtgaggatatttcctttttcaccataggcctcagtacactccaaatatccatttacagataatacaaatgactgtatccaaactgctcaatcaaaagaaagttcaactgtgcatgatgaatgcacacatcacaagggtgtttctcagaaagattttgtcttgtttttaggtgaagatatttcttatttccccagaggcctcaatgggctctcaaatattccctttcatattctactaaatgactgtatcgaagctgctcaatcaaaagacgggtttaacagtgtgagacgaaaatacaccttcctaggaagtttctcagaattcttctttctagttttttatgtgaagatatttccttttccactataggcctcaaagcgttccaaatatccacttgcagatactacaaatagagcgtttcaaaactgctcaatcaaaagaaaggttcaaccctgtgagatgaatgcagacatcaaaaagaagtttctcagaatgtttccgccttgtttttatgtgaagatatttcctttttcaccataggcctcaaagcactggtaatatccatttgcagatactacaaaaaaactgttcccaaactgctcaataaaaagaaagtttcaactctaggagataaaagcaaatatcacaaagaagtttctcagaaactttctatctagtttttatgtgaacatatttcttatcaccccatagacctcaatcggctcacaagtatccttctgcagattgtaaaaaactactgtttccaaaccgctcaatcacaggaaagttttaactctgtgaaatgaatgcatccatcacagagaagtttctcagaatgcttccgtctcgttttcatgtgaagaagattccttttccaccatattcctcatgcgttccaaataaacacttgcagattccgctaaaagagtgtttcaaaactgctcaatcaaaagaaaggttctagtcggtgagatgaatgcacacatcacaaagaagtttctatgaatgcttctgtctgatttatattgaagatatttcctttttcaccgtaggcctcagagtgcttaaaatatccatttgcagatactagaaaagactgtttccaaactgctcaatcaaaataaagttcaactcagtgagatgaatgcacacatcaccaagacgtttctgagaaagattctgtctcgtttttatgtgaagatatttcctgtttccccagaggcatcaatgggctcacaaatattcctttgcatattctacaaaatgactgtttagaaggtgctcaatcaaaaaaaaagttcaacagtgtgagatgaatgcgcccattcaaaggaagtttctcagaattcttctatctagttttcatgtgaagatatttcctttttcactataggccacaaagtgctccaaatatccacttgcagactctgcaaaacgagtgtatccacactgctcaatcaaaagaaaatttcaactgtgtgagatgaatgcacacatcaaaataaatttctccaaaacttctgcctactttttatgggaagatatttcgtttttcaatgtaggccaaaagcactccaaatatcaatttgcagattctacaaaaagactgtttccaaactgctcaatcaacagaaagtttcaacccggtgagtagaagacacacatgacaaaatagtttctcagaaagtatctgtctagtttttacgtgaagatatttcctatcaccccagaagcctcaatgggctcacaaatattcctttgcagattctacaaaacgacagtttcaaaactgctgaatcaaaagaaaggttcaactctgggagatgaatgcacagatcacaaataagtttctcagaatgctgctgcctagttttaatgggaagagatttccttttccaccataggcctcaaagctctccaaatagccatttgcagatactgtaaaaagactgtttccaaactgctgaatcaaaagaaaggttgaactccatgagttgaatgcacacgtcataaagaagtttctcagaatggttctgactagtttttatgtgaagatattttcttttccaccataggcctcaaagcgctgaaaatatccacttgaagattctacagaaagagagtttcaaaactgctcaaacaaaagaaagattcaactctgtgagatgaatgcacacatcacaaagaagtttctcagaatgcttctgtctagttttatgtaaagatatttccttttctactataggccacaaagcactccaaatatcaacttgcagattctgcagaaagagttattcaaagctgctcaatcaaaagaaaagttcaactccttgagacgaatgcacacatcatgaagttcctcagaatgcttctatttttatgtgaagatatatccttttctaccatagaccacaaaacgctccaaatatccccttgcagattctactaaaagagtgtttccaaaaggctcaatcaaaagaaagtttcaaatctgtgagatgaatgcacacatcacaaagaagtttctcagaatgcttctgtctagttttatgtaaagatatttccttttctactataggccacaaagcactccaaatatcaacttgcagattctgcagaaagagtttttcaaagctgctcagtcaaaagacaagttcaactctttgagatgaatgcacacatcatgaagttcctcagaatgcttctatttttatgtgaagatatatccttttctaccatagaccacaaaacgctccaaatatccccttgcagtttctactaaaagagtgtttccaaacggctcaatcaaaagaaagtttcaactctgtgagatgaatgcacacatcattaagaagtgtctcagtaattttctgtctagtttttatgtgaagatatttcctttcctactataggcctgaaagtgctgcaaatatccgtttgcagatactgcaaaaagactgtttccacactgctcaatcaaaggaaatgtccaactctgtgagttgaatgcacgcatctcaaagagattacttataatgattctgtctggttttgatgtgaagatatttgcttttccaccagtggcctcaaactctccaaatatccacttgcagattctacaataagagtgtttcaaaactgctcaatcaaaagaaaggttcaacactgtgagatgaatgcacacgtcacaaagcactttcttagaatgcttctgtctagcttttatgtgaagatatttcctttttcaccataggctgcaaagcgctccaaatatccctttcagattctacagaaagagtatttcaaaactgttcaatcaaaagagaaactcaactctggtgatgaatgcacacatcacaaagcagtttctcataatgtttctgtctagtttttatgtgaagatatttcattctccactataggccgtaatgcactcctaatatccacttgcagattctacaaaaagactgtttgcaaactgctcaaacaaaagaaaagttcaactctgtgagttgaatgagcacatcacaaagaagtttctcagaatgcttctgtctagtttttatgtgaatatatttccttttccactataggtcgtcatgcgctccaaatatccacttgcagattctacaaaaagactgtttccaaactgctcaatcaaaagaaaagctcaactctgtgagttgaatgagcacatcacaaagaagtttctcagaatgcttctatctagtttttatgtgaatatatttccttttccaccacaggccacaaaccctccaaatatccacttgaagattctacaaaaagagtgcttcaaaaatactcaatcaaaagaaaggttcaactcttcgagatggacgcacacatcacaaagaagcttctcagaatgtttctgtctagtttttttgtgaagatatttccttttccactgaagtcctcaagtctctccaactatctactttcagaatctccaaaaagagtgttttaaatctgctgtaccaaagaaagtttcatgtctgagatatgactgcatacaacacagagaactttctcaaagtgcttctgtttatttttcttatgaagatatttccttttccactatgggccacagagcgctccaaatatccactggcagattctacaaaaagagtgtttcaaaactgctcaatcaatagaaagtttgaagtctgtgagatgaatgtgcacatcacaaaggagtttctaagaatgcttccatctgaattttatgtgaggatatttcctttttcaccataggcctcaatacactccaaatatccatttacagataatacaaatgactgtatccaaactgctcaatcaaaagaaagttcaactgtgcatgatgaatgcacacatcacaagggtgtttctcagaaagattttgtcttgtttttaggtgaagatatttcttatttccccagaggcctcaatgggctctcaaatattccctttcatattctactaaatgactgtatcgaagctgctcaatcaaaagacgggtttaacagtgtgagacgaaaatacaccttcctaggaagtttctcagaattcttctttctagttttttatgtgaagatatttccttttccactataggcctcaaagcgttccaaatatccacttgcagatactacaaatagagcgtttcaaaactgctcaatcaaaagaaaggttcaactctgtgagatgaatgcagacatcaaaaagaagtttctcagaatgcttccgccttgtttttatgtgaagatatttcctttttcaccataggcctcaaagcactggtaatatccatttgtagatactacaaaaagactgttcccaaactgctcaataaaaagaaagtttcaactctatgagataaaagctaatatcacaaagaagtttctcagaaactttctatctagtttttatgtgaacatatttcttatcaccccatagacctcaatcggctcacaagtatccttctgcagattgtaaaaaactactgtttccaaaccgctcaatcacaggaaaggtttaactctgtgaaatgaatgcatccatcacagagaagtttctcagaatgcttccgtctcgttttcatgtgaagaagattccttttccaccatattcctcatgcgttccaaataaacacttgcagattccgctaaaagagtgtttcaaaactgctcaatcaaaagaaaggttctagtcggtgagatgaatgcacacatcccaaagaagtttctatgaatgcttctgtctgatttatattgaagatatttcctttttcaccgtaggcctcagagtgcttaaaatatccatttgcagatactagaaaagactgtttccaaactgctcaatcaaagtaaagttcaactcagtgagatgaatgcacacatcaccaagacgtttctgagaaagattctgtctcgtttttatgtgaagatatttcctgtttccccagaggcatcaatgggctcacaaatattcctttgcatattctacaaaatgactgttcagaaggtgctcaatcaaaaaaaaagttcaacagtgtgagatgaatgcgcccattcaaaggaagtttctcagaattcttctatctagtttttatgtgaagatatttcctttttcactataggccacaaagtgctccaaatatccacttgcagactctacaaaacgagtgtatccacactgctcaatcaaaagaaaatttcaactgtgtgagatgaatgcacacatcaaaataaatttctccaaaacttctgcctactttttatgggaagatatttcgtttttcaacgtaggccaaaagcactccaaatatcaatttgcagattctacaaaaagactgtttccaaactgctcaatcaagagaaagtttcaacccggtgagtagaagtcacacatgacaaaatagtttctcagaaagtatctgtctagtttttatgtgaagatatttcctatcaccccagaagcctcaatgggctcacaaatattcctttgcagattctacaaaacgacagtttcaaaactgctgaatcaaaagaaaggttcaactctgtgagatgaatgcacagatcacaaataagtttctcagaatgctgctgtctagtttttatgggaagagatttccttttccaccataggcctcaaaactctccaaatagccatttgcagatactataaaaagactgtttccaaactgctgaatcaaaagaaaggttgaactccatgagttgaatgcacatgtcacaaagaagtttctcagaatgcttctgactagtttttatgtgaagatattttcttttccaccataggcctcaaagcgctgaaaatatccacttgaagattctacagaaagagagtttcaaaactgctcaaacaaaagaaagattcaactctgtgagatgaatgcacacatcacaaagaagtttctcagaatgcttctgtctagttttatgtaaagatatttccttttctactataggccacaaagcactccaaatatcaacttgcagattctgcagaaagagtttttcaaagctgctcaatcaaaagaaaagttcaaatctttgagatgaatgcacacatcaggaagttcctcagaatgcttctatttttatgtgaagatatatccttttctaccatagaccacaaaacgctccaaatatccccttgcagtttctactaaaagagtgtttccaaacggctcaatcaaaagaaagtttcaactctgtgagatgaatgcacacatcattaagaagtgtctcagtaattttctgtctagtttttatgtgaagatatttcctttcctactataggcctgaaagtgctgcaaatatccgtttgcagatactgcaaaaagactgtttccacactgctcaatcaaaggaaatgtccaactctgtgagttgaatgcacgcatctcaaagagattacttataatgattctgtctggttttgatgtgaagatatttgcttttccaccagtggcctcaaactctccaaatatccacttgcagattctacaataagagtgtttcaaaactgctcaatcaaaagaaaggttcaacactgtgagatgaatgcacacgtcacaaagcactttcttagaatgcttctgtctagcttttatgtgaagatatttcctttttcaccataggctgcaaagcgctccaaatatccctttcagattctacagaaagagtatttcaaaactgttcaatcaaaagagaaactcaactctggtgatgaatgcacgcatcacaaagcagtttctcataatgtttctgtctagtttttatgtgaagatatttcattctccactataggctgtaatgcactcctaatatccacttgcagattctacaaaaagactgtttgcaaactgctcaaacaaaagaaaagttcaactctgtgagttgaatgagcacatcacaaagaagtttctcagaatgcttctgtctagtttttatgtgaatatatttccttttccactataggtcgtcatgcgctccaaatatccacttgcagattctacaaaaagactgtttccaaactgctcaatcaaaagaaaagctcaactctgtgagttgaatgagcacatcacaaagaagtttctcagaatgcttctatctagtttttatgtgaatatatttccttttccaccacaggccacaaaccctccaaatatccacttgaagattctacaaaaagagtgcttcaaaaatactcaatcaaaagaaaggttcaactcttcgagatggacgcacacatcacaaagaagcttctcagaatgtttctgtctagtttttttgtgaagatatttccttttccactgaagtcctcaagtctctccaactatctactttcagaatctccaaaaagagtgttttaaatctgctgtaccaaagaaagtttcatgtctgagatatgactgcatacaacacagagaactttctcaaagtgcttctgtttatttttcttatgaagatatttccttttccactatgggccacagagcgctccaaatatccactggcagattctacaaaaagagtgtttcaaaactgctcaatcaatagaaagtttgaagtctgtgagatgaatgtgcacatcacaaaggagtttctaagaatgcttccatctgaattttatgtgaggatatttcctttttcaccataggcctcaatacactccaaatatccatttacagataatacaaatgactgtatccaaactgctcaatcaaaagaaagttcaactgtgcatgatgaatgcacacatcacaagggtgtttctcagaaagattttgtcttgtttttaggtgaagatatttcttatttccccagaggcctcaatgggctctcaaatattccctttcatattctactaaatgactgtatcgaagctgctcaatcaaaagacgggtttaacagtgtgagacgaaaatacaccttcctaggaagtttctcagaattcttctttctagttttttatgtgaagatatttccttttccactataggcctcaaagcgttccaaatatccacttgcagatactacaaatagagcgtttcaaaactgctcaatcaaaagaaaggttcaactctgtgagatgaatgcagacatcaaaaagaagtttctcagaatgcttccgccttgtttttatgtgaagatatttcctttttcaccataggcctcaaagcactggtaatatccatttgtagatactacaaaaagactgttcccaaactgctcaataaaaagaaagtttcaactctatgagataaaagctaatatcacaaagaagtttctcagaaactttctatctagtttttatgtgaacatatttcttatcaccccatagacctcaatcggctcacaagtatccttctgcagattgtaaaaaactactgtttccaaaccgctcaatcacaggaaaggtttaactctgtgaaatgaatgcatccatcacagagaagtttctcagaatgcttccgtctcgttttcatgtgaagaagattccttttccaccatattcctcatgcgttccaaataaacacttgcagattccgctaaaagagtgtttcaaaactgctcaatcaaaagaaaggttctagtcggtgagatgaatgcacacatcccaaagaagtttctatgaatgcttctgtctgatttatattgaagatatttcctttttcaccgtaggcctcagagtgcttaaaatatccatttgcagatactagaaaagactgtttccaaactgctcaatcaaagtaaagttcaactcagtgagatgaatgcacacatcaccaagacgtttctgagaaagattctgtctcgtttttatgtgaagatatttcctgtttccccagaggcatcaatgggctcacaaatattcctttgcatattctacaaaatgactgttcagaaggtgctcaatcaaaaaaaaagttcaacagtgtgagatgaatgcgcccattcaaaggaagtttctcagaattcttctatctagtttttatgtgaagatatttcctttttcactataggccacaaagtgctccaaatatccacttgcagactctacaaaacgagtgtatccacactgctcaatcaaaagaaaatttcaactgtgtgagatgaatgcacacatcaaaataaatttctccaaaacttctgcctactttttatgggaagatatttcgtttttcaacgtaggccaaaatcactccaaatatcaatttgcagattctacaaaaagactgtttccaaactgctcaatcaagagaaagtttcaacccggtgagtagaagtcacacatgacaaaatagtttctcagaaagtatctgtctactttttatgtgaagatatttcctatcaccccagaagcctcaatgggctcacaaatattcctttgcagattctacaaaacgacagtttcaaaactgctgaatcaaaagaaaggttcaactctgtgagatgaatgcacagatcacaaataagtttctcagaatgctgctgtctagtttttatgggaagagatttccttttccaccataggcctcaaaactctccaaatagccatttgcagatactataaaaagactgtttccaaactgctgaatcaaaagaaaggttgaactccatgagttgaatgcacatgtcacaaagaagtttctcagaatgcttctgactagtttttatgtgaagatattttcttttccaccataggcctcaaagcgctgaaaatatccacttgaagattctacagaaagagagtttcaaaactgctcaaacaaaagaaagattcaactctgtgagatgaatgcacacatcacaaagaagtttctcagaatgcttctgtctagttttatgtaaagatatttccttttctactataggccacaaagcactccaaatatcaacttgcagattctgcagaaagagtttttcaaagctgctcaatcaaaagaaaagttcaaatctttgagatgaatgcacacatcatgaagttcctcagaatgcttctatttttatgtgaagatatatccttttctaccatagaccacaaaacgctccaaatatccccttgcagtttctactaaaagagtgtttccaaacggctcaatcaaaagaaagtttcaactctgtgagatgaatgcacacatcattaagaagtgtctcagtaattttctgtctagtttttatgtgaagatatttcctttcctactataggcctgaaagtgctgcaaatatccgtttgcagatactgcaaaaagactgtttccacactgctcaatcaaaggaaatgtccaactctgtgagttgaatgcacgcatctcaaagagattacttataatgattctgtctggttttgatgtgaagatatttgcttttccaccagtggcctcaaactctccaaatatccacttgcagattctacaataagagtgtttcaaaactgctcaatcaaaagaaaggttcaacactgtgagatgaatgcacacgtcacaaagcactttcttagaatgcttctgtctagcttttatgtgaagatatttcctttttcaccataggctgcaaagcgctccaaatatccctttcagattctacagaaagagtatttcaaaactgttcaatcaaaagagaaactcaactctggtgatgaatgcacgcatcacaaagcagtttctcataatgtttctgtctagtttttatgtgaagatatttcattctccactataggccgtaatgcactcctaatatccacttgcagattctacaaaaagactgtttgcaaactgctcaaacaaaagaaaagttcaactctgtgagttgaatgagcacatcacaaagaagtttctcagaatgcttctgtctagtttttatgtgaatatatttccttttccactataggccgtcatgcgctccaaatatccacttgcagattctacaaaaagactgtttccaaactgctcaatcaaaagaaaagctcaactctgtgaggtgaatgagcacatcccaaagaagttcctcagaatgcttctatctagtttttatgtgaatatatttgcttttccaccacaggccacaaaccctccaaatatccacttgaagattctacaaaaagagtgcctcaaaaatgcgcaatcaaaagaaaggttcaactcttcgagatggacgcacacatcacaaagaagcttctcagaatgtttctgtctagtttttttgtaaagatatttccttttccaccgtagtcctcaagtctctccaaatatctactttcagaatctccaaaaagagtgttttaaaactgctgtaccaaagaaagtttcatgtcggagatatgactgcatacaacacagagaagtttctcaaagtgcttctgtttatttttcttatgaagatatttccttttccactatgggccacagagtgctccaaatatccactggcagattctacaaaaagggtgtttcaaaagctgctcaatcaatagaaagtttgaagtctgtgagatgaatgtacacatcacaaaggagtttctaagaatgcttccatctgaattttatgtgaggatatttcctttttcaccataggcctcagtacactccaaatatccatttacagataatacaaatgactgtatccaaactgctcaatcaaaagaaatttcaactctgtatgatgaatgcacacatcacaagggtgtttctcagaaagattttgtctagtttttaggtgaagatatttcttatttccccagaggcctcaatgggctctcaaatattccctttcatattctactaaatgactgtatcgaagctgctcaatcaaaagacgggtttaacagtgtgagacgaaaatacaccttcctaggaagtttctcagaattcttctttctagttttttatgtgaagatatttccttttccactataggcctcaaagcgttccaaatatccacttgcagatactacaaatagagcgtttcaaaactgctcaatcaaaagaaaggttcaactctgtgagatgaatgcagacatcaaaaaaactttctcagaatgcttccgccttgtttttatgtgaagatatttcctttttcaccatacgcctcaaagcactggtaatatccatttgcagatactacaaaaagactgttcccaaactgctcaataaaaagaaattttcaactctatgagataaaagctaatatcacaaagcagtttctcagaaactttctatctagtttttatgtgaacatatttcttatcaccccatagacctcaatcggctcacaagtatccttctgcagattgtaaaaaactactgtttccaaaccgctcaatcacaggaaaggtttaactctgtgaaatgaatgcatccatcacagagaagtttctcagaatgcttccgtctcgttttcatgtgaagaagattccttttccaccatattcctcatgcgctccaaagaaacacttgcagattccgctaaaagagtgtttcaaaactgctcaatcaaaagaaaggttctagtcggtgagatgaatgcacacatcacaaagaagtttctatgaatgcttctgtctgatttatattgaagatatttcctttttcaccgtaggcctcagagtgcttaaaatatccatttgcagatactagaaaagactgcttccaaactgctcaatcaaaataaagttcaactcagtgagatgaatgcacacatcaccaagacgtttctgagaaagattctgtctcgtttttatgtgaagatatttcctgtttccccagaggcatcaatgggctcacaaatattcctttgcatattctacaaaatgactgtttagaaggtgctcaatcaaaaaaaaagttcaacagtgtgagatgaatgcgcccattcaaaggaagtttctcagaattcttctatctagtttttatgtgaagatatttcctttttctctataggccacaaagtgctccaaatatccacttgcagactctacaaaacgagtgtatccacactgctcaatcaaaagaaaatttcaactgtgtgagatgagtgcacacatcaaaataaatttctccaaaacttctgcctactttttatgggaagatatttcgtttttcaacgtaggccaaaagcactccaaatatcaatttgcagattctacaaaaagactgtttccaaactgctcaatcaacagaaagtttcaacccggtgagtagaagtcacacatgacaaaatagtttctcagaaagtatctgtctagtttttacgtgaagatatttcctatcaccccagaagcctcaatgggctcacaaatattcctttgcagattctacaaaacgacagtttcaaaactgctgaatcaaaagaaaggttcaactctgggagatgaatgcacagatcacaaataagtttctcagaatgctgctgcctagttttaatgggaagagatttccttttccaccataggcctcaaagctctccaaatagccatttgcagatactgtaaaaagactgtttccaaactgctgaatcaaaagaaaggttgaactccatgagttgaatgcacacgtcataaagaagtttctcagaatggttctgactagtttttatgtgaagatattttcttttccaccataggcctcaaagcgctgaaaatatccacttgaagattctacagaaagagagtttcaaaactgctcaaacaaaagaaagattcaactctgtgagatgaatgcacacatcacaaagaagtttctcagaatgcttctgtctagttttatgtaaagatatttccttttctactataggccacaaagcactccaaatatcaacttgcagattctgcagaaagagtttttcaaagctgctcaatcaaaagaaaagttcaactctttgagatgaatgcacacatcatgaagttcctcagaatgcttctatttttatgtgaagatatatcgttttctaccatagaccacaaaacgctccaaatatccccttgcagtttctactaaaagagtgtttccaaacggctcaatcaaaagaaagtttcaactctgtgagatgaatgcacacatcattaagaagtttctcagtaattttctgtctagtttttatgtgaagatatttcctttcctactataggcctgaaagtgctccaaatatccgtttgcagatactgcaaaaagactgtttccacactgctcaatcaaaggaaatgtccaactctgtgagttcaatgcacgcatctcaaagagattacttataatgattctgtctagttttgatgtgaagatatttgcttttccaccagtggcctcaaactctccaaatatccacttgcagattctacaataagagtgtttcaaaactgcttaatcaaaagaaaggttcaacactgtgagatgaatgcacacgtcacaaagcactttcttagaatgcttctgtctagcttttatgtgaagatatttcctttttcaccataggctgcaaagcgctccaaatacccctttcagattctacagaaagagtgtttcaaaactgttcaatcaaaagagaaactcaactctggtgatgaatgcacgcatcacaaagcagtttctcataatgtttctgtctagtttttatgtgaagatatttcattctccactataggccataatgcactcctaatatccacttgcagattctacaaaaagactgtttgcaaactgctcaaacaaaagaaaagttcaactctgtgagttgaatgagcacatcacaaagaagtttctcagaatgcttctgtctagtttttatgtgaatatatttccttttccactataggccgtcatgcgctccaaatatccacttgcagattctacaaaaagactgtttccaaactgctcaatcaaaagaaaagctcaactctgtgagttgaatgagcacatcacaaagaagtttctcagaatgcttctatctagtttttatgtgaatatatttccttttccaccacaggccacaaaccctccaaatatccacttgaagattctacaaaaagagtgcttcaaaaatgctcaatcaaaagaaaggttcaactcttcgaaatggacgcacacatcacaaagaagcttctcagaatgtttctgtctagtttttttgtgaagatatttccttttccaccgtagtcctcaagtctctccaaatatctactttcagaatctccataaagagtgttttaaaactgctgtaccaaagaaagtttcatgtctgagttatgactgcatacaacacagagaactttctcaaagtgcttctgtttatttttcttatgaagatatttccttttccactatgggccacagagcgctccaaatatccactggcagattctacaaaaagagtgtttcaaaactgctcaatcagtagaaagtttgaggtgtgtgagatgaatgtacacatcacaaaggagtttctaagaatgcttccatctgaattttatgtgaggatacttcctttttcaccataggcctcagtacactccaaatatccatttacagataatacaaatgactgtatccaaactgctcaatcaaaagaaagttcaactgtgtatgatgaatgcacacatcacaagggtgtttctcagaaagattttgtctagtttttaggtgaagatatttcttatttccccagagtcctcaatgggctctcaaatattccctttcatattatactaaatgactgtattgaagctgctcaatcaaaagacgggtttaacagtgtgagacgaaaatacaccttcctaggaagtttctcagaattcttctttctagttttttatgtgaagatatttccttttccactataggcctcaaagcgttccaaatatccacttgcagatactacaaatagagcgtttcaaaactgctcaatcaaaggaaaggttcaactctgtgagatgaatgcagacatcaaaaagaagtttctcagaatgcttctgccttgtttttatgtgaagatatttcctttttcaccataggcctcaaagcactggtaatatccatttgcagatactacaaaaagactgttcccaaactgctcaataaaaagaaagtttcaactctaggagataaaagcaaatatcacaaagaagtttctcagaaactttctatctagtttttatgtgaacatatttcttatcaccccatagacctcaatcggctcacaagtatccttctgcagattgtaaaaaactactgtttccaaaccgctcaatcacaggaaaggtttaactctgtgaaatgaatgcatccatcacagagaagtttctcagaatgcttccgtccgttttcatgtgaagaagattccttttccaccatattcctcatgcgctccaaagaaacacttgcagattccgctaaaagagtgtttcaaaactgctcaatcaaaagaaaggttctagtcggtgagatgaatgcacacatcacaaagaagtttctatgaatgcttctgtctgatttatattgaagatatttcctttttcaccgtaggcctcagagtgcttaaaatatccatttgcagatactagaaaagactgtttccaaactgctcaatcaaagtaaagttcaactcagtgagataaatgcacacatcaccaagacgtttctgacaaagattctgtctcgtttttatgtgaagatatttcctgtttccccagaggcatcaatgggctcacaaatattcctttgcatattctacaaaatgactgtttagaaggtgctcaatcaaaaaaaaagttcaacagtttgagatgaatgcgcccattcaaaggaagtttctcagaattcttctatctagtttttatgtgaagatatttcctttttcactataggccacaaagtgctccaaatatccacttgcagactctacaaaacgagtgtatccacactgctcaatcaaaagaaaatttcaactgtgtgagatgagtgcacacatcaaaataaatttctccaaaacttctgcctactttttatgggaagatatttcgtttttcaacgtaggccaaaagcactccaaatatcaatttgcagattctacaaaaagactgtttccaaactgctcaatcaacagaatgtttcaacccggtgagtagaagtcacacatgacaaaatagtttctcagaaagtatctgtctagttttaatgtgaagatatttcctatcaccccagaagcctcaatgggctcacaaatattcctttgcagattctacaaaacgacagtttcaaaactgctgaatcaaaagaaaggttcaactctgtgagatgaatgcacagatcacaaataagtttctcagaatgctgctgtctagtttttatgggaagatatttccttttccaccataggcctcaaagctctccaaatagccatttgcagatactgtaaaaagactgtttccaaactgctgaatcaaaagaaaggttgaactccatgagttgaatgcacacgtcacaaaaatttcccagaatgcttctgactagtttttatgtgaagatattttcttttccaccataggcctcaaagcgctgaaaatatccacttgaagattctacaaaatgagagtttcaaaactgctcaaacaaaagaaagattcaactctgtgagatgaatgcacacatcacaaagaagtttctcagaatgcttctgtctagttttatgtaaagatatttccttttctactataggccacaaagcactccaaatatcaacttgcagatactgcagaaagagtttttcaaagctgctcaatcaaaagaaaagttcaactctttgagacgaatgcacacatcaggaagttcctcagaatgcttctatttttatgtgaagacatatccttttctaccatagaccacaaaacgctccaaatatccccttgcagtttctactaaaagagtgtttcccaactgctcaatcaaaagaagtttcaactctgtgagatgaatgcacacatcattaagaagtttctcagtaattttgtgtctagtttttatgtgaagatatttcctttcctactataggcctgaaagtgctccaaatatccgtttgcagatactgcaaaaagactgtttccaaactgctcaatcaaaggaaatgtccaactctgtgagttgaatgcacgcatctcaaagagattacttataatgattctgtctagttttgatgtgaagatatttgcttttccaccagtggcctcaaactctccaaatatccacttgcagattctacaataagagtgtttcaaaactgctcaatcaaaagaaaggttcaacactgtgagatgaatgcacacgtcacaaagcactttcttagaatgcttctgtctagcttttatgtgaagatatttcctttttcaccataggctgcaaagcgctccaaatatccctttcagattctacagaaagagagtttcaaaactgttcaatcaaaagagaaactcaactctggtgatgaatgcacgcatcacatagtagtttctcatcatgtttttgtctggtttttatgtgaagatatttcattttccactataggccgtaatgcactcctaatatccacttgcagattctacagaaagactgtttgcaaactgctcaaacaaaagaaaagttcaactctgtgagttgaatgagcacatcacaaagaagtttctcagaatgcttctgtctagtttttatgtgaatatatttccttttccactataggccgtaatgcgctccaaatatccacctgcagattctacagaaagactgtttctaaactactcaatcaaaagaaaagctcaactctgtgagttgaatgagcacatcaaaaaaagtttctcagaatgcttctatctagtttttatgggaatatatttccttttccaccacaggccacaaacactccaaatatccacttgaagattctacaaaaagagtgcttcaaaaatgctctatcaaaagaaaggttcaactctttgagatggatgcacacatcacaaagaagcttctcagaatgtttctgtctagtttttgtgtgaagatatttccttttccaccatagtcctcaagtctctccaaatatctactttcagaatctccaaaaagagtgttttaaaactgctgtatcaaagaaagtttcatgtctgagatatgactgcatacagcacagagaagtttctcaaagtgcttctgtttattttttttatgaagatatttccttttccactattggccacagagcgctccaaatatccactggcagattctacaaaaagagtgtttcaacactgctcaatctatagaaagtttgaagtctgtgagatgaatgcacacatcacaaaggagtttctaagaatgcttccatctgaattttatgtgaggatatttcctttttcaccataggcgtcagtacattccaaatatccatttacagataatacaaatgactgtatccaaactgctcaatcaaaagaaagttcaactgtgtatgatgaatgcacacatcacaagggtgtttctcagaaagtttttgtctagcttttaggtgaagatatttcttatttccccagaggcctcaatgggctctcaaatattccctttcatattctactaaatgactgtatcgaagctgctcaatcaaaagacgggtttaacagtgtgagacgaaaatacaccttcctaggaagtttctcagaattcttctttccagttttttatgtgaagatatttccttttccattataggcctgaaagcgttccaaatatccacttgcagatactacaaatagagcgtttcaaaactgctcaatcaaaagaaaggttcaactctgtgagatgaatgcagacatccaaaagaagtttctcagaatgcttctgccttgtttttatgtgaagatatttcctttttcaccataggcctcaaagcactggtaatatccatttgcagatactacaaaaagactgttcccaaactgctcaataaaaagaaagtttcaactctaggagataaaagcaaatatcacaaagaagtttctcagaaactttctatctagtttttatgtgaacatatttcttatcaccccatagacctcaatcggctcacaagtatccttctgcagattgtaaaaaactactgtttccaaaccgctcaatcacaggaaaggtttaactctgtgaaatgaatgcatccatcacagagaagtttctcagaatgcttccgtccgttttcatgtgaagaagattccttttccaccatattcctcatgcgctccaaagaaacacttgcagattccgctaaaagagtgtttcaaaactgctcaatcaaaagaaaggttctagtcggtgagatgaatgcacacatcacaaagaagtttctatgaatgcttctgtctgatttatattgaagatatttcctttttcaccgtaggcctcagagtgcttaaaatatccatttgcagatactagaaaagactgtttccaaactgctcaatcaaattaaagttcaactcagtgagatgaatgcacacatcaccaagacgtttctgagaaagattctgtctcgtttttatgtgaagatatttcctgtttccccagaggcatcaatgggctcacaaatattcctttgcagattctacaaaatgactgtttagaaggtgctcaatcaaaaaaaaagttcaacagtgtgagatgaatgtgcccattcaaaggaagtttctcagaattcttctatctagtttttatgtgaagatatttcctttttcactataggccacaaagtgctccaaatatccacttgcagactctacaaaacgagtgtatccacactgctcaatcaaaagaaaatttcaactgtgtgagatgaatgcacacatcaaaataaatttctccaaaacttctgcctactctttatgggaagatatttcgtttttcaacgtaggccaaaagcactccaaatatcaatttgcagattctacaaaaagactgtttccaaactgctcaatcaagagaaagtttcaacccggtgagtagaagtcacacatgacaaaatagtttcccagaaagtatctattaattttttatgtgaagatatttcctatcaccccagaagcctcaatgggctcacaaatattcctttgcagattctacaaaacgacagtttcaaaactgctgaatcaaaagaaaggttcaactctgtgagatgaatgcacagatcacaaataagtttctcagaatgctgctgtctggtatttatgggaagatatttccttttccaccataggcctcaaagttctccaaatagccatttgcagatactgtaaaaagactgtttccaaactgctgaatcaaaagaaaggttgaactccatgagttgaatgcacacgtcacaaagaagtttctcagaatgcttctgactagtttttatgtgaagatattttcttttccaccataggcctcaaagcattgaaaatatccacttgaagattctacaaaaagagagtttcaaaactgctcaaacaaaagaaagattcaactctgtgagatgaatgcacacatcacaaagaagtttctcagaatgcttctgtctagttttatgtaaagatatttccttgtctactataggccacaaagcactccaaatatcaacttgcagattctgcagaaagagtttttcaaagctgctcaatcaaaagaaaagttcaactctttgagatgaatgcacacatcaggaagttcctcagaatgcttctatttttatgtgaacatatatccttttctaccatagaccacaaaacgctccaaatatccccttgcagtttctactaaaagagtgtttccaaactgctcaatcaaaagaaagtttcaactctgtgagatgaatgcacacatcattaagaagtttctcagtaattttctgtctagtttttatgtgaagatatttaatttcctactataggcctgaaagtgctccaaatatccgtttgcagatactgcaaaaagactgtttccaaactgctcaatcaaaggaaatgtccaactctgtgagttgaatgcacgcatctcaaagagattacttataatgattctgtctagttttgatgtgaagatatatgcttttccagcagtgtcctcaaactctccaaatatacacttgcagattctacaataagagtgtttcaaaactgctcaatcaaaagaaaggttcaacactgtgagatgaatgcacacgtcacaaagcactttcttagaatgcttctgtctagcttttatgtgaagatatttcctttttcaccataggctgcaaagcgctccaaatatccctttcagattctacagaaagagtgtttcaaaactgttcaatcaaaagagaaactcaactctggtgatgaatgcacgcatcacaaagcagtttctcatcttgtttctgtctggtttttatgtgaagatatttcattttccactataggccgtaatgcactcctaacatccacttgcagattctacagaaagactgtttgcaaactgctcaaacaaaagaaaagttcaactctgtgagttgaatgagcacatcacaaagaagtttctcagaatgcttctgtctagtttttatgtgaatatatttccttttccactatagtccgtaatgcgctcctagtatccacctgcagattctacaaaaagactgtttccaaactgctcaatcaaaagaaaagctcaactctgtgagttgaatgagcacatcacaaagaagtttctcagaatgcttctatctagtttttatgtgaatatatttccttttccaccacaggccacaaacactccaaatatccacttgaagattctacaaaaagagtgcttcaaaaatgctcaatcaaaagaaaggttcaactctttgagatggatgcacacatcacaaagaagcttctcagaatgtttctgtctagtttttttgtgaagatatttccttttccaccgtagtcctcaagtctctccaaatatctactttcagaatctccaaaaagagtgttttaaaactgctgtaccaaagaaagtttcatgtctgagatatgactgcatacaacacagagaagtttctcaaagtgcttctgtttattttttttatgaagatatttccttttccactattggccacagagcgctccaaatatccactggcagattctacaaaaagagtgtttcaaaactgctcaatcaatagaaagtttgaagtctgtgagatgaatgcacacatcacaaaggagtttctaagaatgcttccatctgaattttatgtgaggatatttcctttttcaccataggcctcagtacactccaaatatccatttacagataatacaaatgactgtatccaaattgctcaatcaaaagaaagttcaactgtgtatgatgaatgcacacatcacaagggtgtttctcagaaagtttttgtgtagtttttaggtgaagatatttcttatttccccagaggcctcaatgggctctcaaatattccctttcatattctactaattgactgtatcgaagctgcccaatcaaaagacgggtttaacagtgtgagacgaaaatacaccttcctaggaagtttctcagaatacttctttgtagttttttatgtgaagatatttccttttccactataggcctcaaagcgttccaaatatccacttgcagatactacaaatagagagtttcaaaactgctcaatcaaaagaaaggttcaactctgtgagatgaatgcagacatcaaaaagtagtttctcagaatgcttctgccttgtttttatgtgaagatatttcctttttcaccataggcctcaaagcactggtaatatccatttgcagatactacaaaaagactgttcccaaactgctcaataaaaagaaagtttcaactctatgagataaaagcaaatatcacaaagaagtttctcagaaactttctatctagtttttatgtgaacatatttcttatcaccccatagacctcaatcggctcacaagtatccttctgcagattgtaaaaaactactgtttccaaaccgctcaatcacaggaaaggtttaactctgtgaaatgaatgcatccatcccagagaagtttctcagaatgcttctgtctcgttttcatgtgaagaagattccttttccaccatattcctcatgcgctccaaagaaacacttgcagattccgctaaaagagtgtttcaaaactgctcaatcaaaagaaaggttctagtcggtgagatgaatgcacacatcacaaagaagtttctatgaatgcttctgtctgatttatattgaagatatttcctttttcaccgtaggcctcagagtgcttaaaatatccatttgcagatactagtaaagactgtttccaaactgctcaatcaaagtaaagttcaactcagtgagatgaatgcacacatcaccaagacgtttctgagaaagattctgtctcgtttttatgtgaagatatttcctgtttccccagaggcatcaatgggctcacaaatattcctttgcatattctacaaaatgactgttcagaaggtgctcaatcaaaaaaaaaagttcaacagtgtgagatgaatgcgcccattcaaaggaagtttctcagaattcttctatctagtttttatgtgaagatatttcctttttcactataggccacaaagtgctccaaatatccacttgcagactctacaaaacgagtgtatccacactgctcaatcaaaagaaaatttcaactgtgtgagatgaatgcacacatcaaaataactttctccaaaacttctgcctactttttatgggaagatatttcgtttttcaacgtaggccaaaagcactccaaatatcaatttgcagattctacaaaaagactgtttccaaactgctcaatcaacagaaagtttcaacccggtgagtagaagtcacacatgacaaaatagtttctcagaaagtatctgtctagtttttctgtgaagatatttcctatcaccccagaagcctcaatgggctcacaaatattcctttgcagattctacaaaacgacagtttcaaaactgctgaatcaaaagaaaggttcaactctgtgagatgaatgcacagatcacaaataagtttctcagaatgctgctgtctagtttttatgggaagagatttccttttccaccataggcctcaaaactctccaaatagccatttgcagatactgtaaaaagactgtttccaaactgctgaatcaaaagaaaggttgaactccatgagttgaatgcacacgtcacaaagaagtttctcagaatgcttctgactagtttttatgtgaagatattttcttttccaccataggcctcaaagcgctgaaaatatccacttgaagattctacaaaaagagagtttcaaaactgctcaaacaaaagaaagattcaactctgtgagatgaatgcacacatcacaaagaagtttctcagaatgcttctgtctagttttatgtaaagatatttccttttctactataggccacaaagcactccaaatatcaacttgcagatcctgcagaaagagtttttcaaagctgctcaatcaaaagaaaagttcaactctttgagatgaatgcacacatcaggaagttcctcagaatgcttctatttttatgtgaagatatagccttttctgccatagaccacaaaacgctccaaatatccccttgcagtttctactaaaagagtgtttccaaactgctcaatcaaaagaaagtttcaactctgtgagatgaatgcacacatcataaagaagtttctcagtaatatgctgtctagtttttatgtgaagatatttcctttcctactataggcctgaaagtgctccaaatatccgtttgcagatactgcaaaaagactgtttccaaactgctcaatcaaaggaaatttccaactctgtgagttcaatgcacgcatctcaaagagattacttataatgattctgtctagttttgatgtgaagctatttgcttttccaccagtggcctcaaactctccaaatatccacttgcagattctacaataagagtgtttcaaaactgctcaatcaaaagaaaggttcaacactgtcagatgaatgcacacgtcacaaagcactttcttagaatgcttctgtctagcttttatgtgaagatatttcctttttcaccataggctgcaaagcgctccaaatatccctttcagattctacagaaagagtgtttcaaaactgttcaatcaaaagagaaactcaactctggtgatgaatgcacgcatcacaaagcagtttctcatcatgtttctgtctagtttttatgtgaagatatttcattttccactataggccgtaatgcactcctaatatccacttgcagattctacagaaagactgtttgcaaactgctcaaacaaaagaaaagttcaactctgtgagttgaatgagcacatcacaaagaagtttctcagaatgcttctgtctagtttttatgtgaatatatttccttttccactataggccgtaatgcgctccaaatatccacctgcagattctacagaaagactgtttccaaactgctcaatcaaaagaaaagctcaactctgtgagttgaatgagcacatcacaaagaagtttctcagaatgcttctatctagtttttatgtgaatatatttccttttccaccagaggccacaaacactccaaatatccacttgaagattctacaaaaagagtgcttcaaaaatgctcaatcaaaagaaaggttcaactcttcgagatggatgcacacatcacaaagaagcttctcagaatgtttctgtctagtttttttgtgaagatatttccttttccatcatagtcctcaagtctctccaaatatctactttcagaatctccaaaaatattgttttaaaactgctgtaccaaagaaagtttcatgtctgagatatgactgcatacaacacagagaagtttctcaaagtgcttctgtttattttttttatgaagatatttccttttccactatgggcatcagaacgctccaaatatccactggcagattctacaaaaagagtgtttcaaaactgctcaatcaatagaaagtttgaagtctgtgagatgaatgcacacatcacataggagtttctaagagtgcttccatctgaattttaggtgaaggtatttcctttttcaccatagacctcagtacactccaaatatccatttacagataatacaaatgactgtatccaaactgctcaatcaaaagaaagttcaactgtgtatgatgaatgcacacatcacaagggtgtttctcagaaagtttttgtctagtttttaggtgaagatatttcttatttccccagaggcctcaatgggctctcaaatattccctttcatattctactaaatgactgtatcgaagctgctcaatcaaaagacgggtttaacagtgtgagacgaaaatacagcttcctaggaagtttctcagaattcttctttctaggtttttatgtgaagatatttccttttccactataggtctcaaagcgttccaaatatccacttgcagatactacaaatagagcgtttcaaaactgctgaatcaaaagaaaggttgaactccgtgagttgaatgcacacgtcacaaagaagtttctcagaatgcttctggctagtttttatgtgaagatattttcttttccaccataggcctcaaagcattgaaaatatccacttgaagattctacaaaaagagagtttcaaaactgctcaaacaaaagaaagattcaactctgtgagatgaatgcacacatcacaaagaagtttctcagaatgcttctgtctagttttatgtaaagatatttccttttctactataggccacaaagcattccaaatatcaacttgcagattctgcagaaagagtttttcaaagctgctcaatcaaaagaaaagttcaactctttgagatgaatgcacacatcaggaagttcctcagaatgcttctatttttatgtgaagatatagccttttctaccatagaccacaaaacgctccaaatatccccttgcagtttctactaaaagagtgtttccaaactgctcaatcaaaagaagtttcaactctgtgagatgaatgcacacatcattaagaagtttctcagtaattttctgtctagtttttatgtgaagatatttcctttcctactataggcctgaaagtgctccaaatatccgtttgcagatactgcaaaaagactgtttccaaactgctcaatcaaaggaaatgtccaactctgtgagttgaatgcacgcatctcaaagagattacttataatgattctgtctagttttgatgtgaagatatttgcttttccaccagtggcctcaaactctccaaatattcacttgcagattctacaataagagtgtttcaaaactgctcaatcaaaagaaaggttcaacactgtcagatgaatgcacacgtcacaaagcactttcttagaatgcttctgtctagcttttatgtgaagatatttcctttttcaccataggctgcaaagcgctccaaatatccctttcagattctacagaaagagtgtttcaaaactgttcaatcaaaagagaaactcaactctggtgatgaatgcacgcatcacaaagcagtttctcatcatgtttctgtctggtttttatgtgaagatatttcattttccactataggccgtaatgcactcctaatatccacttgcagattctacagaaagactgtttgcaaactgctcaaacaaaagaaaagttcaactctgtgagttgaatgagcacatcacaaagaagtttctcagaatgcttctgtctagtttttatgtgaatatatttccttttccactagaggctgtaatgcgctcctaatatccacctgcagattctacagaaagactgttaccaaactgctcaatcaaaagaaaagctcaactctgtgagttgaatgagcacatcacaaagaagtttctcagaatgcttctatctagtttttatgtgaatatatttccttttccaccacaggccacaaacactccaattatccacttgaagattctacaaaaagagtgcttcaaaaatgctcaatcaaaagaaaggttcaactctttgagatggatgcacacatcacaaagaagcttctcagaatgtttctgtctagtttttttgtgaagatatttccttttccaccgtagtcctcaagtctctccaaatatctacttccagaatctccaaaaagagtgttttaaaactgctgtaccaaagaaagtttcatgtctgagatatgactgcatacaacacagagaagtttctcaaagtgcttctgtttattttttttatgaagatatttccttatccactattggccacagagcgctccaaatatccactggcagattctacaaaaagagagtttcaaaactgctcaatcattagaaagtttgaagtctgtgagatgaatgaacacaacacaaaggagtttctaagaatgcttccatctgaattttatgtgaggatatttcctttttcaccataggcctcagtacactccaaatatccatttacagatagtacaaatgactgtatccaaactgctcaatcaaaagaaagttcaactgtgtatgatgaatgcacacatcacaagggtgtttctcagaaaatttttgtctagtttttaggtgaagatatttcttatttccccagaggcctcaatgggctctcaaatattccctttcatattctactaaatgactgtatcgaagctgctcaatcaaaagacgggtttaacagtgtgagacgaaaatacaccttcctaggaagtttctcagaattcttctttcagggtttttatgtgaagatatttccttttccactataggtctcaaagcgttccaaatatccacttgcagacactacaaatagagcgtttcaaaactgctcaatcaaaagaaaggttcaactctgcgagatgaatgcagacatcaaaaagaagtttctcagaatgcttctgccttgtttttatgtgaagatatttcctttttcaccataggcctcaaagcactggtaatatccatttgcagatactacaaaaagactgttcccaaactgctcaataaaaagaaagtttcaactctaggagataaaagcaaatatcacaaagaagtttctcagaaactttctatctagtttttatgtgaacatatttcttatcaccccatagacctcaatcggctcacaagtatccttctgcagattgtaaaaaaactactgtttccaaaccgctcaatcacaggaaaggtttaactctgtgaaatgaatgcatccatcacagagaagtttctcagaatgcttccgtccgttttcatgtgaagaagattccttttccaccatattcctcatgcgctccaaagaaacacttgcagattccgctaaaagagtgtttcaaaactgctcaatcaaaagaaaggttctagtcggtgagatgaatgcacacatcacaaagaagtttctatgaatgcttctgtctgatttatattgaagatatttcctttttcaccgtaggcctcagagtgcttaaaatatccatttgcagatactagaaaagactgtttccaaactgctcaatcaaattaaagttcaactcagtgagatgaatgcacacatcaccaagacgtttctgacaaagattctgtctcgtttttatgtgaagatatttcctgtttccccagaggcatcaatgggctcacaaatattcctttgcatattctacaaaatgactgtttagaaggtgctcaatcaaaaaaaaagttcaacagtgtgagatgaatgcgcccattcaaaggaagtttctcagaattcttctatctagtttttatgtgaagatatttcctttttcactataggccacaaagtgctccaaatatccacttgcagactctacaaaacgagtgtatccacactgctcaatcaaaagaaaatttcaactgtgtgagttgaatgcacacatcaaaataaatttctccaaaacttctgcctactttttatgggaagatatttcgtttttcaacgtaggccaaaagcactccaaatatcaatttgcagattctacaaaaagactttttccaaactgctcaatcaacagaaagtttcaacccggtgagtagaagtcacacatgacaaaatagtttctcagaaagtatctgtctagtttttatgtgaagatatttcctatcaccccagaagcctcaatgggctcacaaatattcctttgcagattctacaaaacgacagtttcaaaactgctgaatcaagagaaaggttcaactctgtgagatgaatgcgcagatcacaaataagtttctcagaatgctgctgtctagtttttatgggaagatatttccttttccaccataggcctcaaagctctccaaatatccatctgcagatactgtaaaaagactgtttccaaactgctgaatcaaaagaaaggttgaactccatgagttgaatgcacacgtcacaaagaagtttctcagaatgcttctgactagtttttatgtgaagatattttcttttccaccataggcctcaaagcgctgaaaatatccacttgaagattctacagaaagagagtttcaaaactggtcaaacaaaagaatgattcaactctgtgagatgaatgcacacttcacaaagcactttcttagaatgcttctgtctagcttttatttgaagatatttcctttttcaccataggctgcaaagcgctccaaatatccctttcagattctacagagagagtgtttcaaaactgttcaatcaaaagagaaattcaactctggtgatgaatgcacgcatcacagagcagtttctcataatgtttctgtctattttttatgtgaagttatttcattttccactataggccgtaatgcactcctaatatccacttgcagattctacaaaaagactgtttgcaaactgctcaaacaaaagaaaagttcaactctgtgagttgaatgagcacatcacaaagaagtttctcagaatgcttctgtctagtttttatgtgagtatatttccttttccactataggccataatgcgctccaaatatccacctgcagattctacaaaaagactgtttccaaactgctcaatcaaaagaaaagttcaactctgtgagatgaatgagcacatcacaaagaagtttctcagaatgcttctatctagtttttatgtgaatatatttccttttccaccacaggacacaaacactccaaatatccacttgaagattctacaaaaagagtgcttcaaaaatgctcaatcaaaagaaaggttcaactcttcgagatggatgcacacatcacaaagaagcttctcagaatgtttctgtctagtttttttgtgaagatatttccttttccaccgtagtcctcaagtctctccaaatatctactttcagaatctccaaaaagagtgttttaaaactgctgtaccaaagaaagtttcatgtctgagatatgactgcatacaacacagagaagtttctcaaagtgcttctgtttattttttttatgaagatatttccttttccactattggccacagagcgctccaaatatccactggcagattctacaaaaagagtgtttcaaaactgctcaatcaatagaaagtttgaagtctgtgagatgaatgcacacatcacaaaggagtttctaagaatgcttccatctgaattttatgtgaggatatttcctttttcaccataggcctcagtacactccaaatacccatttacagataatacaaatgactgtatccaaactgctcaatcaaaagaaagttcaactgtgtatgatgaatgcacacaacacaagggtatttctcagaaagtttttgtctagttttaggtgaagatatttcttatttccccagaggcctcaatgggctctcaaatattccctttcatattctactaaatgactgtatcgaagctgctcaatcaaaagaggggtttaacagtgtgagacgaaaatacaccttcctaggaagtttctcagaattcttctttctagttttttatttgaagatatttccttttccactataggcctcaaagcgttccaaatatccacttgcagatactacaaatagagcgtttcaaaactgctcaatcaaaagaaaggttcaactctgcgagatgaatgcagacatcaaaaagaagtttctcagaatgcttctgccttgtttttatgtgaagatatttcctttttcaccataggcctcaaagcactggtaatatccatttgcagatactacaaaaagactgttcccaaactgctcaataaaaagaaagtttcaactctaggagataaaagcaaatatcacaaagaagtttctcagaaactttctatctagtttttatgtgaacatatttcttatcaccccatagacctcaatcggctcacaagtatccttctgcagattgtaaaaaactactgtttccaaaccgctcaatcacaggaaaggtttaactctgtgaaatgaatgcatccatcacagagaagtttctcagaatgcttccgtccgttttcatgtgaagaagattccttttccaccatattcctcatgcgctccaaagaaacacttgcagattccgctaaaagagtgtttcaaaactgctcaatcaaaagaaaggttctagtcggtgagatgaatgcacacatcacaaagaagtttctatgaatgcttctgtctgatttatattgaagatatttcctttttcaccgtaggcctcagagtgcttaaaatatccatttgcagatactagaaaagactgtttccaaactgctcaatcaaattaaagttcaactcagtgagatgaatgcacacatcaccaagacgtttctgataaagattctgtctcgtttttatgtgaagatatttcctgtttccccagaggcatcaatgggctcacaaatattcctttgcatattctacaaaatgactgtttagaaggtgctcaatcaaaaaaaaagttcaacagtgtgagatgaatgcgcccattcaaaggaagtttctcagaattcttctatctagtttttatgtgaagatatttcctttttcactataggccacaaagtgctccaaatatccacttgcagactctacaaaacgagtgtatccacactgctcaatcaaaagaaaatttcaactgtgtgagatgagtacacacatcaaaataaatttgtccaaaacttctgcctactttttatgggaggatatttcgtttttcaacgtaggccaaaagcactccaaatatcaatttgcagattctacaaaaagactttttccaaactgctcaatcaacagaaagtttcaacccggtgagtagaagtcacacatgacaaaatagtttctcagaaagtatctgtctagtttttatgtgaagatatttcctatcaccccagaagcctcaatgggctcacaaatattcctttgcagattctacaaaacgacagtttcaaaactgctgaatcaagagaaaggttcaactctgtgagatgaatgcgcagatcacaaataagtttctcagaatgctgctgtctagtttttatgggaagatatttccttttccaccataggcctcaaagctctccaaatatccatctgcagatactgtaaaaagactgtttccaaactgctgaatcaaaagaaaggttgaactccatgagttgaatgcacacgtcacaaagaagtttctcagaatgcttctgactagtttttatgtgaagatattttcttttccaccataggcctcaaagcgctgaaaatatccacttgaagattctacagaaagagagtttcaaaactggtcaaacaaaagaatgattcaactctgtgagatgaatgcacacttcacaaagcactttcttagaatgcttctgtctagcttttatttgaagatatttcctttttcaccataggctgcaaagcgctccaaatatccctttcagattctacagagagagtgtttcaaaactgttcaatcaaaagagaaattcaactctggtgatgaatgcacgcatcacagagcagtttctcataatgtttctgtctattttttatgtgaagttatttcattttccactataggccgtaatgcactcctaatatccacttgcagattctacaaaaagactgtttgcaaactgctcaaacaaaagaaaagttcaactctgtgagttgaatgagcacatcacaaagaagtttctcagaatgcttctgtctagtttttatgtgaatatatttccttttccactataggccgtaatgcgctccaaatatccacctgcagattctacaaaaagactgtttccaaactgctcaatcaaaagaaaagttcaactctgtgagatgaatgagcacatcacaaagaagtttctcagaatgcttctatctagtttttatgtgaatatatttccttttccaccacaggccacaaacactccaaatatccacttgaagattctacaaaaagagtgcttcaaaaatgctcaatcaaaagaaaggttcaactctttgagatggatgcacacatcacaaagaagcttctcagaatgtttctgtctagtttttttgtgaagatatttccttttccaccgtagtcctcaagtctctccaaatatctactttcagaatctccaaaaagagtgttttaaaactgctgtaccaaagaaagtttcatgtctgagatatgactgcatacaacacagagaagtttctcaaagtgcttctgtttattttttttatgaagatatttccttttccactattggccacagagcgctccaaatatccactggcagattctacaaaaagagtgtttcaaaactgctcaatcaatagaaagtttgaagtctgtgagatgaatgcacacatcacaaaggagtttctaagaatgcttccatctgaattttatgtgaggatatttcctttttcaccataggcctcagtacactccaaatacccatttacagataatacaaatgactgtatccaaactgctcaatcaaaagaaagttcaactgtgtatgatgaatgcacacaacacaagggtgtttctcagaaagtttttgtctagttttaggtgaagatatttcttatttccccagaggcctcaatgggctctcaaatattccctttcatattctactaaatgactgtatcgaagctgctcaatcaaaagaggggtttaacagtgtgagacgaaaatacaccttcctaggaagtttctcagaattcttctttctagttttttatgtgaagatatttccttttccactataggcctcaaagcgttccaaatatccacttgcagatactacaaatagagcgtttcaaaactgctcaatcaaaagaaaggttcaactctgcgagatgaatgcagacatcaaaaagaagtttctcagaatgcttctgccttgtttttatgtgaagatatttcctttttcaccataggcctcaaagcactggtaatatccatttgcagatactacaaaaagactgttcccaaactgctcaataaaaagaaagtttcaactctaggagataaaagcaaatatcacaaagaagtttctcagaaactttctatctagtttttatgtgaacatatttcttatcaccccatagacctcaatcggctcacaagtatccttctgcagattgtaaaaaactactgtttccaaaccgctcaatcacaggaaaggtttaactctgtgaaatgaatgcatccatcacagagaagtttctcagaatgcttccgtccgttttcatgtgaagaagattccttttccaccatattcctcatgcgctccaaagaaacacttgcagattccgctaaaagagtgtttcaaaactgctcaatcaaaagaaaggttctagtcggtgatatgaatgcacacatcacaaagaagtttctatgaatgcttctgtctgatttatattgaagatatttcctttttcaccgtaggcctcagagtgcttaaaatatccatttgcagatactagaaaagactgtttccaaactgctcaatcaaattaaagttcaactctgtgagatgaatgcacacatcaccaagacgtttctgagaaagattctgtctcgtttttatgtgaagatatttcctgtttccccagaggcatcaatgggctcacaaatattcctttgtatattctacaaaatgactgtttagaaggtgctcaatcaaaaaagaatttcaacagtgtgagatgaatgcgcccattcaaaggaagtttctcagaattcttctatctagtttttatgtgaagatatttcctttttcactataggccacaaagtgctccaaatatccacttgcagactcttcgaaacgagtgtatccacactgctcaatcaaaagaaaatttcaactgtgtgagatgaatgcacacatcaaaataactttctccaaaacttctgcctactttttatgggaagatatttcgtttttcaacgtaggccaaaagcactccaaatatcaatttgcagattctacaaaaagactgtttccaaactgctcaatcaacagaaagtttcaacccggtgagtagaagtcacacatgacaaaatagtttctcagaaagtatctgtctagtttttctgtgaagatatttcctatcaccccagaagcctcaatgggctcacaaatattcctttgcagattctacaaaacgacagtttcaaaactgctgaatcaaaagaaaggttcaactctgtgagatgaatgcacagatcacaaataagtttctcagaatgctgctgtctagtttttatgggaagatatttccttttccaccataggcctcaaagctctccaaatagccatttgcagatactgtaaaaagactgtttccaaactgctgaatcaaaagaaaggttgaactccatgagttgaatgcacacgtcacaaagaagtttctcagaatgcttctgactagtttttatgtgaagatattttcttttccaccataggcctcaaagcgctgaaaatatccacttgaagattctacaaaatgagagtttcaaaactgctcaaacaaaagaaagattcaactctgtgagatgaatgcacacatcacaaagaagtttctcagaatgcttctgtctagttttatgtaaagatatttccttttctactataggccacaaagcactccaaatatcaacttgcagattctgcagaaagagtttttcaaagctgctcaatcaaaagaaaagttcaactctttgagatgaatgcacacatcaggaagttcctcagaatgcttctatttttatgtgaagatatagccttttctaccatagaccacaaaatgctccaaatatccccttgcagtttctactaaaagagtgtttccaaactgctcaatcaaaagaaagtttcaactctgtgagatgaatgcacacatcattaagaagtttctcagtaattttctgtctagtttttatgtgaagatatttcctttcctactataggcctgaaagtgctccaaatatccgtttgcagatactgcaaaaagactgtttccaaactgctcaatcaaaggaaatgtccaactctgtgagttgaatgcacgcatctcaaagagattacttataatgattctgtttagttttgatgtgaagatatttgcttttccaccagtggcctcaaactctccaaatatccacttgcagattctacaataagagtgtttcaaaactgctcaatcaaaagaaaggttcaacactgtgagatgaatgcacacgtcacaaagcactttcttagaatgcttctgtctagcttttatgtgaagatatttcctttttcaccataggctgcaaagcgctccaaatatccctttcagattctacagaaagagtgtttcaaaactgttcaatcaaaagagaaactcaactctggtgatgaatgcacgcatcacaaagcagtttctcataatgtttctgtctagtttttatgtgaagatatttcattttccactataggccgtaatgcactcctaatatccacttgcagattctacagaaagactgtttgcaaactgctcaaacaaaagaaaagttcaactctgtgagttgaatgagcacatcacaaagaagtttctcagaatgcttctgtctagtttttatgttaatatatttccttttccactataggccgtaatgcgctccaaatatccacctgcagattctacaaaaagactgtttccaaactgctcaatcaaaagaaaagctcaactctgtgagatgaatgagcacatcacaaagaagtttctcagaatgcttctatctagtttttatgtgaatatatttccttttccaccacaggccacaaacactccaaatatccacttgaagattctacaaaaagagtgcttcaaaaatgctcaatcaaaagaaaggttcaactctttgagatggatgcacacatcacaaagaagcttctcagaatgtttctgtctagtttttttgtgaagatatttccttttccaccgtagtcctcaagtctctccaaatatctactttcagaatctccaaaaagagtgttttaaaactgctgtaccaaagaaagtttcatttctgagatatgactgcatacaacacagagaagtttctcaaagtgcttctgtttattttttttatgaagatatttccttttccactatgggccacagagcgctccaaatatccactggcagattctacaaaaagagtgtttcaaaactgctcaatcaatagaaagtttgaagtctgtgagatgaatgcacacatcacataggagtttctaagaatgcttccatctgaattttatgtgaggatatttcctttttcaccataggcctcagtacactccaaatatccatttccagataatacaaatcactgtatccaaactgctcaatcaaaagaaagttcaactgtgtatgatgaatgcacacatcacaagggtgtttctcagaaagcttttgtctagtttttaagtgaagatatttcttatttccccagaggcctcaatgggctctcaaatattccctttcatattctactaaatgactgtatcgaagctgctcaatcaaaagacgggtttaacagtgtgagacgaaaatacaccttcctaggaagtttctcagaattcttctttctagttttttatgtgaagatatttccttttccactataggcctcaaagcgttccaaatatccacttgcagatactacaaatagagagtttcaaaactgctcaatcaaaagaaagtttcaactctgcgagatgaatgcagacatcaaaaagaagtttctcagaatgcttctgccttgtttttatgtgaagatatttcctttttcaccataggcctcaaagcactggtaatatccatttgcagatactacaaaaagactgttcccaaactgctcaataaaaagaaagtttcaactctaggagataaaagcaaatatcacaaagaagtttctcagaaactttctatctagtttttatgtgaacatatttcttatcaccccatagacctcaatcggctcacaagtatccttctgcagattgtaaaaaactactgtttccaaaccgctcaatcacaggaaaggtttaactctgtgaaatgaatgcatccatcacagagaagtttctcagaatgcttccgtctcggtttcatgtgaagaagattccttttccaccatattcctcatgcgctccaaggaaacacttgcagattccgctaaaagagtgtttcaaaactgctcaatcaaaagaaaggttctagtcggtgagatgaatgcacacatcccaaagaagtttctatgaatgcttctgtctgatttatattgaagatatttcctttttcaccgtaggcctcagagtgcttaaaatatccatttgcagatactagaaaagactgtttccaaactgctcaatcaaagtaaagttcaactcagtgagatgaatgcacacatcaccaagacgtttctgagaaagattctgtctcgtttttatgtgaagatatttcctgtttccccagaggcatcaatgggctcacaaatattcctttgcagattctacaaaatgactctttagaaggtgctcaatcaaaaaaaaagttcaacagtgtgagatgaatgcgcccattcaaaggaagtttctcagaattcttctatctagtttttatgtgaagatatttcctttttcactataggccacaaagtgctccaaatatccacttgcagactctacaaaacgagtgtatccacactgcacaatcaaaagaatatttcaactgtgtgagatgaatgcacacatcaaaataaatttctccaaaacttctgcctactttttatgggaagatatttcgtttttcaacgtaggccaaaagcactccaaatatcaatttgcagattctacaaaaagactgtttccaaactgctcaatcaacagaaagtttcaacccagtgagtagaagtcacacatgacaaaatagtttctcagaaagtatctgtctagtttttatgtgaagatatttcctatcaccccagaagcctcaatggtctcacaaatattcctttgcagattctacaaaacgacagtttcaaaactgctgaatcaaaagaaaggttcaactctgtgagatgaatgcacagatcacaaataagtttctcagaatgctgctgtctagtttttatcggaagagatttccttttcgaccataggcctcaaagctctccaaatagccatttgcagatactgtaaaaagactgtttccaaactgctgaatcaaaagaaaggttgaactccatgagttgaatgcacacgtcacaaagaagtttctcagaatgcttctgactagtttttatgtgaagatattttcttttccaccgtaggcctcaaagcgctgaaaatatccacttgaagattctacaaaaagagagtttcaagactgctcaaacaaaagaaagattcaactctgtgagatgaatgcacacatcacaaagaagtttctcagaatgcttctgtctagttttatgtaaagatatttccttttctactataggccacaaagcactccaaatatcaacttgcagattctgcagaaagagtttttcaaagctgctcaatcaaaagaaaagttcaactctttgagatgaatgcacacatcatgaagttcctcagaatgcttctatttttatgtgaagatatagccttttctaccatagaccacaaaacgctccaaatatccccttgcagtttctactaaaagagagtttccaaacggctcaatcaaaagaagtttcaactctgtgagatgaatgcacacatcattaagaagtttctcagtaattttctgtctggtttttatgtgaagatatttcctttcctactataggcctgaaagtgctccaaatatccgtttgcagatactgcaaaaagactgtttccaaactgctcaatcaaaggaattgtccaactctgtgagttgaatgcacgcatctcaaagagattacttataatgattctgtctagttttgatgtgaagatatttgcttttccaccagtggcctcaaactctccaaatatccacttgcagattctacaataagagtgtttcaaaactgctcaatcaaaagaaaggttcaacactgtgagatgaatgcacacgtcacaaagcactttcttagaatgcttctgtctagcttatatgtgaagatatttctttttcaccataggctgcaaagcgctccaaatatccctttcagattctacagaaagagtttttcaaaactgttcaatcaaaagagaaattcaactctggtgatgaatgcacgcatcacaaagcagtttctcatcatgtttctgtctagtttttatgtgaagatatttcattttccactataggccgtaatgcactcctaatatccacttgcagattctacagaaagactgtttgcaaactgctcaaacaaaagaaaagttcaactctgtgagttgaatgagcacatcacaaagaagtttctcagaatgcttctgtctagtttttatgtgaatatatttccttttccactataggccgtaatgcgctccaaatatccacctgcagattctacaaaaagactgtttccaaactgctcaatcaaaagaaacgttcaactctgtgagttgaatgagcacatcacaaagaagtttctcagaatgcttctatctagtttttatgtgaatatatttccttttccaccacaggccacaaacactccaaatatccacttgaagattctacaaaaagagtgcttcaaaaatgctcaatcaaaagaaaggttcaactctttgagatggatgcacacatcacaaagaagcttctcagaatgttcctgtctagtttttttgtgaagatatttccttttccaccgtagtcctcaagtctctccaaatatctactttcagcatctccaaaaagagtgttttaaaactgctgtaccaaagaaagtttcgtgtctgagatatgactgcatacaacacagagaagtttctcaaagtgcttctgtttattttttttatgaagatatttccttttccactattggccacagagcgctccaaatatccactggcagattctacaaaaagagtgtttcaaaactgctcaatcaatagaaagtttgaagtctgtgagatgaatgcacacatcacaaaggagtttctaagaatgcttccatctgaattttatgtgaggatatttcctttttcaccataggcctcaatacactccaaatatccatttacagataatacaaatgactgtatccaaactgctcaatcaaaagaaagttcaactgtgtatgatgaatgcacacatcacaagggtgtttctcagaaagtttttgtctagcttttaggtgaagatatttcttatttccccagaggtctcaatgggctctcaaatattccctttcatattctactaaatgactgtatcgaagctgctcaatcaaaagacgggtttaacagtgtgagacgaaaatacaccttcctaggaagtttctcagaattcttctgtctaattttttatgtgaagatatttccttttccactataggcctcaaagcgttccaaatatccacttgcagatactacaaatagagcgtttcagaactgctcaatcaaaagaaaggttcaactctgtgagatgaatgcagacatcaaaaagaagtttctcagaatgcttctgccttgtttttatgtgaagatatttcctttttcaccataggcctgaaagcactggtaatatccatttgcagatactacaaaaagactgttcccaaactgctcaataaaaagaaagtttcaactctaggagataaaagcaaatatcacaaagaagtttctcagaaactttctatctagtttttatgtgaacatatttcttatcaccccatagacctcaatcggctcacaagtatccttctgcagattgtaaaaaaactactgtttccaaaccgctcaatcacaggaaaggtttaactctgtgaaatgaatgcatccatcacagagaagtttctcagaatgcttccgtctcgtttttatgtgaagaagattccttttccaccatattcctcatgcgctccaaagaaacacttgcagattccgctaaaagagtgtttcaaaactgctcaatcaaaagaaaggttctagtcggtgagatgaatgcacatattacaagtttctatgaatgcttctgtctgatttatattgaagatatttcctttttcaccgtaggcctcagagtgcttaaaatatccatttgcagatactagaaaagactgtttccaaactgctcaatcaaaataaagttcaactcagtgagatgaatgcacacatcaccaagacgtttctgagaaagattctgtctcgtttttatgtgaagatatttcctgtttccccagaggcatcaatgggctcacaaatattcctttgcatattctacaaaatgactgtttagaaggtgctcaatcaaaaaaaaaagttcaacagtgtgagatgaatgcgcccattcaaaggaagtttctcagaattcttctatctagtttttatgtgaagatatttcctttttcactataggccacaaagtgctccaaatatccacttgcagactctacaaaacgagtgtatccacactgctcaatcaaaagaaaatttcaactgtgtgagatgaatgcacacatcaaaataaatttgtccaaaacttctgcctactttttatgggaagatatttcgtttttcaacgtaggccaaaagcactccaaatatcaatttgcagattctacaaaaagactgtttccaaactgctcaatcaagagaaagtttcaacccgttgagtagaagtcacacatgacaaaatagtttctcagaaagtatctctctagtttttatgtgaagatatttcctatcaccccggaagcctcaatgggctcacaaatattcctttgcagattctacaaaacgacagtttcaaaactgctgaatcaaaagaaaggttcaactctgtgagatgaatgcacagatcacaaataagtttctcagaatgctgctgtctggcatttatgggaagatatttccttttccaccataggcctcaaagctctccaaatagccatttgcagatactgtaaaaagactgtttccaaactgctgtatcaaaagaaaggttgaactccatgagttgaatgcacacgtcacaaagaagtttctcagaatgcttctgactaagtttttatgtgaagatattttcttttccacagtaggcctcaaagcgctgaaaatattcacttgaagattctacaaatgagagtttcaaaactgctcaaacaaaagaaagattcaactctgtgagatgaatgcacacatcacaaagaagtttctcagaatgcttctgtctagttttatgtaaagatatttccttttctactataggccacaaagcactccaaatatcaacttgcagattctgcagaaagagtttttcaaagctgctccatcaaaagaaaagttcaactctttgagatgaatgtacacatcaggaagttcctcagaatgcttctattattatgtgaagatatagccttttctaccatagaccacaaaacgctccaaatatccccttgcagtttctactaaaagagtgtttccaaactgctcaatcaaaagaagtttcaactctgtgagatgaatgcactcatcaataagaagtttttctgtaattttctgtctagtttttatgtgaagatatttcctttcccactataggcctgaaagtgctccaaatatccgtttgcagatactgcaaaaagactgtttccaaactgctcaatcaaaggaaatgtccaactctgtgagttgaatgcacgcatctcaaagagattactcataatgattctgtctagttttgatgtgaagatatttgcttttccaccagtggcctcaaactctccaaatatccacttgcagattctacaataagagtgtttcaaaactgctcaatcaaaagaaaggttcaacactgtgagatgaatgcacacgtcacaaagcactttcttagaatgcttctgtctagcttttatttgaagatatttcctttttcaccataggctgcaaagcgctccaaatatccctttcagattctacagagagagtgtttcaaaactgttcaatcaaaagagaaattcaactctggtgatgaatgcacgcatcacaaagcagtttctcataatgtttctgtctattttttatgtgaagttatttcattttccactataggccgtaatgcactcctaatatccacttgcagattctacaaaaagactgtttgcaaactgctcaaacaaaagaaaagttcaactctgtgagttgaatgagcacatcataaaaagtttctcagaatgcttctgtctagtttttatgtgaatatatttccttttccactataggccgtaatgtgctccaaatatccacctgcagattctacaaaaagactgtttccaaactgctcaatcaaaagaaaagttcaactctgtgagttgaatgagcacatcacaaagaagcttctcagaatgtttctgtctagtttttttgtgaagatatttccttttccaccgtagtcctcaagtctctccaaatatctactttcagaatctccaaaaagagtgttttaaaactgctgtaccaaagaaagtttcatgtctgagttatgactgcatacaacacagagaagtttctcaaagtgcttctgtttattttttttatgaagatatttccttttccactattggccacagagggctccaaatatccactggcagattctacaaaaagagtgtttcaaaactgctcaatcaatagaaagtttgaagtctgtgagatgaatgcacacatcacaaaggagtttctaagaatgcttccatctgaattttatgtgaggatatttcctttttcaccataggcctcagtacactccaaatatccatttacagataatacaaatgactgtatccaaactgctcaatcaaaagaaagttcaactgtgtatgatgaatgcacaaatcacaatggtgtttctcagaaagtttttgtctagtttttaggtgaagatatttcttatttccccagaggcctcaatgggctctcaaatattccctttcatattctactaaatgactgtatcgaagctgctcaatcaaaagacgggtttaacagtgtgagacgaaaatacaccttcctaggatgtttctcagaattcttctttctagttttttatgtgaagatatttccttttccactataggcctcaaagcgttccaaatatccacttgcagatactacaaatagagcatttcaaaactgctcaatcaaaagaaaggttcaactctgcgagatgaatgcagacatcaaaaagaagtttctcagaatgcttctgccttgtttttatgtgaaggtatttcctttttcaaaataggcctcaaagcactggtaatatccatttgcagatactacaaaaagactgttcccaaactgctcaataaaaagaaagtttcaactctagcagataaaagcaaatatcacaaagaagtttctcagaaactttctatctattttttatgtgaacatatttcttatcaccccatagacctcaatcggctcacaagtatccttctgtagattatgaaaaactactgtttccaaaccgctcaatcacaggaaaggtttaactctgtgaaatgaatgcatccatcacagagaagtttctcagaatgcttccgtctcgtttttatgtgaagaagattccttttccaccatattcctcatgcgctccaaagaaacacttgcagattccgctaaaagagtgtttcaaaactgctcaatcaaaagaaaggttctagtcggtgagatgaatgcacacatcacaaagaagtttctatgaatgcttctgtctgatttatattgaagatatttcctttttcaccgtaggcctcagagtgcttaaaatatccatttgcagatactagaaaagactgtttccaaactgctcaatcaaaataaagttcaactcagtgagatgaatgcacacatcaccaagacgtttctgagaaagattctgtctcgtttttatgtgaagatatttcctgtttccccagaggcatcaatgggctcacaaatattcctttgcatattctacaaaatgactgtttagaaggtgctcaatcaaaaaaaaagttcaacagtgtgagatgaatgcgcccattcaaaggaagtttctcagaattcttctatctagtttttatgtgaagatatttcctttttcactataggccacaaagtgctccaaatatccacttgcagactctgcaaaacgagtgtatccacactgctcaatcaaaagaaaatttcaactgtgtgagatgaatgcacacatcaaaataaatttctccaaaacttctgcctactttttatgggaagatatttcgtttttcaacgtaggccaaaagcactccaaatatcaatttgcagattctacaaaaagactgtttccaaactgctcaatcaagagaaagtttcaacccggtgagtagaagtcacacatgacaaaatagtttctcagaaagtatctgtctagtttttatgtgaagatatttcctatcaccccagaagcctcaatgggctcacaaatattcctttgcagattctacaaaacgacagtttcaaaactgctgaatcaagagaaaggttcaactctgtgagatgaatgcgcagatcacaaataagtttctcagaatgctgctgtctagtttttatgggaagatatttccttttccaccataggcctcaaagctctccaaatatccatctgcagatactgtaaaaagactgtttccaaactgctgaatcaaaagaaaggttgaactccatgagttgaatgcacacgtcacaaagaagtttctcagaatgcttctgactagtttttatgtgaagatattttcttttccaccataggcctcaaagcgctgaaaatatccacttgaagattctacagaaagagagtttcaaaactggtcaaacaaaagaatgattcaactctgtgagatgaatgcacacttcacaaagcactttcttagaatgcttctgtctagcttttatttgaagatatttcctttttcaccataggctgcaaagcgctccaaatatccctttcagattctacagagagagtgtttcaaaactgttcaatcaaaagagaaattcaactctggtgatgaatgcacgcatcacagagcagtttctcataatgtttctgtctattttttatgtgaagttatttcattttccactataggccgtaatgcactcctaatatccacttgcagattctacaaaaagactgtttgcaaactgctcaaacaaaagaaaagttcaactctgtgagttgaatgagcacatcacaaagaagtttctcagaatgcttctgtctagtttttatgtgaatatatttccttttccactataggccgtaatgcgctccaaatatccacctgcagattctacaaaaagactgtttccaaactgctcaatcaaaagaaaagttcaactctgtgagatgaatgagcacatcacaaagaagtttctcagaatgcttctatctagtttttatgtgaatatatttccttttccaccacaggccacaaacactccaaatatccacttgaagattctacaaaaagagtgcttcaaaaatgctcaatcaaaagaaaggttcaactctttgagatggatgcacacatcacaaagaagcttctcagaatgtttctgtctagtttttttgtgaagatatttccttttccaccgtagtcctcaagtctctccaaatatctactttcagaatctccaaaaagagtgttttaaaactgctgtaccaaagaaagtttcatgtctgagatatgactgcatacaacacagagaagtttctcaaagtgcttctgtttattttttttatgaagatatttccttttccactatgggccacagagcgctccaaatatccacttgcagattctacaaaaagagtgtttcaaacctgctcaatcaaaaggaagattttactctatgagatgaatggacacatcacagagaagtttctcaatatgcttttgtctagtttttatgttaagatgtttccttttccattccatgaagtaaagtgatgcaaatatccatttgtagatattacaaaaagactgcttccaaactcctcgatcaaaagaaaggttcaactctgtgagttgaatgcacacatcacaaaaaattttctcagaatgcttctgtctagtttttatgtgaagatatttccttttccaccataggcctcaaagcactcaaaatgtccgtttgcagacactacagaaagacgctttccaagcagctcaatcaaaggaaatgttcagctctgtgaattgaatgcacatcacaaagtagtttcccagaatgtttctttcctgtatatatgtgaagatatttccttttccaatataggcctcaaagcactccaaatatcaacttgcagattctgtgaaaagggtgtttcaaacttcccaatcacaggaaatgttcaactctgtgagatgaatgcacacaacatgaagaatttactcagaatgcttctgtctggtttttatttgaagatatttccttatccactataggccacaaagcgctccatatatccacttgcagatactacaaaaagagtgtttccaagctgctcaatcaaaagaaaggttcaactccgtgagttgaatgcgcacataacaaagaattttctcagaatgcttctgtctagttttcatgtgaagatatttccttttccaccacatgcctcaaagcgctccaaaaatccacaagcagattccataaatagagtatttcaaaactgctgaatcaaaagaaagtttcagctctgtgagatgaatgcacacttcacaatgaagattctcagaatgcttctgtctagtttttatgtgaagataattccttttccacattaggcctcaaagctcttcaaatatcccttgcagattctacaaaaagagtgtttcaaaactgctcaatcgaaagaaaggttcaagtctgtgagatgaatgcacatctcacaaagacgtttctcagaatgcttctgtctagtttttatttgaagatttatccttttccacaataggctgcaaagtgctccaaatatccacttacagattcttcaaaaagagtgtttccagactgctcaatcaaaagaaaggttcaactctgttagttgaatgcacacattacaacaaagtttatcagaatgcttctgtctagtttttaggtgaatatattcccttttaaactgtagtctgcaaagcactccaaatattcacttgcagattctacaaaaaaagtgattcaaaattgttcaatcaaaagaagggttcaacagtgttagttgaatgcacacatcacaaagaagtttctcagaatgcttctgtctagtttttatgtgaagatatatccttttccaccgtaggccccaaagcactccaaatatccactggtagagtctacaaatgtgcgtttcaatactactcaatcaaaagaaacgttcaactttgtgagatgaaagcacgcatcacaaagttgtttctcagaatgctctgtctagtttttatgtgaagatatttccttttataccataggccccaaagtgttccaaatatccaccttcagattctacaaaaagtgtgtttcaaaactgctcaaccaaaagaaaggttcaaacctgtgagatgaatgcacacatcacaaaggagtttctcagaatgcttctgtctagtttttgtgtgaagttatttcctttaccaccataggactgaaagagctccaaatgtccacttgcagaatctacaaaaagagtgtttcaaaattgctcaatcaaaataaaagttcaactctgttagaagaatgcacacatcacaaaaatttcgcagaatgcttctgtctattttttatgtgaagatatttccttttccacttgagactggaaagagcttcaaatatccaattgcagattctgcaaaagagtgtttcaaaactgctcaatcaaaggaaaggtacaattcagtgaactgaatgtgcacatcagaaggaagtttcttagaatacctctgtgcagttattatgtgaagatatttacttttccaccataggccccaaggctctccaaatatccaattgcagattcaacaaaaagtgtgtttcaaaactgctcaatcaaaagaaaggttcaactctgtgggaggaatgctcacatcacacacaggtttctcagaatgcttctgtcttttttctgtgtgaagatatttccttttccactagaggatgcaaagcgctcaaaatatccacttgcagattttacaaaagggtgtttctaaaatgctaaatcaaaatagtttcaagtctgtgagatgaatgcatatatcccaaagaagtttctcagaatgcttctgtctagtttttatgtgaagatataaaattttccactataggccacaaagcgcttcaaatatccacttgcatattcttcaaaaagagtgtttcaaaagtgatgaatcaaaagaaaagttcaactgtgtgagatgaatgcacacatcacaaagaagtttctcagaatgcttctgtctagttttatgtgcagatatttcctctacaatagggaacaaagcactccaaatatccacttacagattctacaaaagcggtgtttcaaaactgctcaatcaaaacaaagtttcaactctgtgagatcattgcacacatcataaagaagtttctcagaatgcttctgtgtagtttttatgtgaagatatttccttttccaccataggcctcaaagtgttccatatatctacctgcagattctagaaaaagagtgtttcaaaactatttaatcaaaagaaaggttcaacccagtgagatgaatgcactcgtcacagagaagattcccagaatgcttctgtctagtttttatgtgaagatatttcctttttcactataggaggcaaagctttccaaatatccaattgcggattccacaaaaaaagtgttccaaaactgctcaatgaaaggaaatgttgaattatgtgagataaaagcacacatcataaaggagtttctaagaatgcttttgtctggtttttatgtgaagatatttccttttcaactataggcctcaaagcgctccaaatatacatttgcagatgctacaaaaagaatgtttccaaactcctcaaagatatgttcaactttgtgagttgaatgcacatatcacaaagtagtttctcagaatgcttctgtccagattttatttgaagatattccctttaccaacataggcctcaaagctctccaaatatcgaattgcagattccacaaaaacagtgtttgaatactgctcaaacaaaagaaaggttcaaccctgtgagatgaatgcatacatcacacagaagtttctcagaatgcttctgtgtagtttttatgtgaagatatttcctttaccaccataagcctcaaagaactccaaatatccacttacagattctacaaaaagagtgcttcaaaactgctcaaccaaaagaaaggttcaactctttgtgatgaatgcacacatcacaaagtaatttttcagaatgcttctgtctagtttttatgtgaatatacatccttttccactataggccacaaagtgctccaaacacccacttgcggattctacaaaaagagtgttttaaacctcctcaacaaaaaagtttcaactctgtgaggtgaatgcacacctcacaaagaacattctcagaatgcttctctctagtttttatgtgaagatatttgcttttccaccataggccgcaaagcgcgccaagtatccacttgcagattttacaaaaatagtgtttcaaaactgctcaaacaaaagaaaggttcaactctgtgagttgaatgcacacatcacaaagaagtttctcagaatgctgctgtctagcttttatccaaagttatttccttttccactatactccacaaagccctctgaatatccacttgcagattctacaaaagaagtgtttcaaaactgcacaatcaaaagaaagtttcgactctgtgagttgtatgcacacatcagaaagaagtttctcagaatgcttttgtgtagtttttatgtgaagatatttccttttccaccataggcaccaaagctctccaaatatccacttgcagattatacaaaaagagggattcaaaactgctcaatcaaaagaaaggttcaactctgtgagttgaaggcacacataacaaaaccgtttctcagaatgcttctccatagtttttatatgaagatatttccatttccaccattctctccaaagtgctccaaatatccacttgcagattctataaaaagagtgtttcaaaactgctcaatgaaaagaaagtttcacctctgttagatgaatggacacatcacaaagacgtttctcagaatgcttctgtctagtgtttacgtgaagatatttccttttccaccacacgactcaaagcactctaaatatgcacttgcagattctaccaaaagagtgtttcaaaaatgttcaatcaaaggaaagtttcaaatctgtgagatgtacgcacacatcacaaagaagtttctcagaatgcttctgccttgtttttatgagaagataattcttttccaccataggccccaaagggctccaaatatccaccgcagatcctacaaaaagtgtttaaaaaatgctaagtcaatagaaagtttaaactctgtgagatgtatgcacacataacaaagaagtttctcagaatgcttctctctaatttttatgtgaggatatttccttctccaccataggcctgaaagcactcgaaatatcccctggcagatcnnnnnnnnnnnnnnnnnnnnnnnnnnnnnnnnnnnnnnnnnnnnnnnnnnnnnnnnnnnnnnnnnnnnnnnnnnnnnnnnnnnnnnnnnnnnnnnnnnnnnnnnnnnnnnnnnnnnnnnnnnnnnnnnnnnnnnnnnnnnnnnnnnnnnnnnnnnnnnnnnnnnnnnnnnnnnnnnnnnnnnnnnnnnnnnnnnnnnnnnnnnnnnnnnnnnnnnnnnnnnnnnnnnnnnnnnnnnnnnnnnnnnnnnnnnnnnnnnnnnnnnnnnnnnnnnnnnnnnnnnnnnnnnnnnnnnnnnnnnnnnnnnnnnnnnnnnnnnnnnnnnnnnnnnnnnnnnnnnnnnnnnnnnnnnnnnnnnnnnnnnnnnnnnnnnnnnnnnnnnnnnnnnnnnnnnnnnnnnnnnnnnnnnnnnnnnnnnnnnnnnnnnnnnnnnnnnnnnnnnnnnnnnnnnnnnnnnnnnnnnnnnnnnnnnnnnnnnnnnnnnnnnnnnnnnnnnnnnnnnnnnnnnnnnnnnnnnnnnnnnnnnnnnnnnnnnnnnnnnnnnnnnnnnnnnnnnnnnnnnnnnnnnnnnnnnnnnnnnnnnnnnnnnnnnnnnnnnnnnnnnnnnnnnnnnnnnnnnnnnnnnnnnnnnnnnnnnnnnnnnnnnnnnnnnnnnnnnnnnnnnnnnnnnnnnnnnnnnnnnnnnnnnnnnnnnnnnnnnnnnnnnnnnnnnnnnnnnnnnnnnnnnnnnnnnnnnnnnnnnnnnnnnnnnnnnnnnnnnnnnnnnnnnnnnnnnnnnnnnnnnnnnnnnnnnnnnnnnnnnnnnnnnnnnnnnnnnnnnnnnnnnnnnnnnnnnnnnnnnnnnnnnnnnnnnnnnnnnnnnnnnnnnnnnnnnnnnnnnnnnnnnnnnnnnnnnnnnnnnnnnnnnnnnnnnnnnnnnnnnnnnnnnnnnnnnnnnnnnnnnnnnnnnnnnnnnnnnnnnnnnnnnnnnnnnnnnnnnnnnnnnnnnnnnnnnnnnnnnnnnnnnnnnnnnnnnnnnnnnnnnnnnnnnnnnnnnnnnnnnnnnnnnnnnnnnnnnnnnnnnnnnnnnnnnnnnnnnnnnnnnnnnnnnnnnnnnnnnnnnnnnnnnnnnnnnnnnnnnnnnnnnnnnnnnnnnnnnnnnnnnnnnnnnnnnnnnnnnnnnnnnnnnnnnnnnnnnnnnnnnnnnnnnnnnnnnnnnnnnnnnnnnnnnnnnnnnnnnnnnnnnnnnnnnnnnnnnnnnnnnnnnnnnnnnnnnnnnnnnnnnnnnnnnnnnnnnnnnnnnnnnnnnnnnnnnnnnnnnnnnnnnnnnnnnnnnnnnnnnnnnnnnnnnnnnnnnnnnnnnnnnnnnnnnnnnnnnnnnnnnnnnnnnnnnnnnnnnnnnnnnnnnnnnnnnnnnnnnnnnnnnnnnnnnnnnnnnnnnnnnnnnnnnnnnnnnnnnnnnnnnnnnnnnnnnnnnnnnnnnnnnnnnnnnnnnnnnnnnnnnnnnnnnnnnnnnnnnnnnnnnnnnnnnnnnnnnnnnnnnnnnnnnnnnnnnnnnnnnnnnnnnnnnnnnnnnnnnnnnnnnnnnnnnnnnnnnnnnnnnnnnnnnnnnnnnnnnnnnnnnnnnnnnnnnnnnnnnnnnnnnnnnnnnnnnnnnnnnnnnnnnnnnnnnnnnnnnnnnnnnnnnnnnnnnnnnnnnnnnnnnnnnnnnnnnnnnnnnnnnnnnnnnnnnnnnnnnnnnnnnnnnnnnnnnnnnnnnnnnnnnnnnnnnnnnnnnnnnnnnnnnnnnnnnnnnnnnnnnnnnnnnnnnnnnnnnnnnnnnnnnnnnnnnnnnnnnnnnnnnnnnnnnnnnnnnnnnnnnnnnnnnnnnnnnnnnnnnnnnnnnnnnnnnnnnnnnnnnnnnnnnnnnnnnnnnnnnnnnnnnnnnnnnnnnnnnnnnnnnnnnnnnnnnnnnnnnnnnnnnnnnnnnnnnnnnnnnnnnnnnnnnnnnnnnnnnnnnnnnnnnnnnnnnnnnnnnnnnnnnnnnnnnnnnnnnnnnnnnnnnnnnnnnnnnnnnnnnnnnnnnnnnnnnnnnnnnnnnnnnnnnnnnnnnnnnnnnnnnnnnnnnnnnnnnnnnnnnnnnnnnnnnnnnnnnnnnnnnnnnnnnnnnnnnnnnnnnnnnnnnnnnnnnnnnnnnnnnnnnnnnnnnnnnnnnnnnnnnnnnnnnnnnnnnnnnnnnnnnnnnnnnnnnnnnnnnnnnnnnnnnnnnnnnnnnnnnnnnnnnnnnnnnnnnnnnnnnnnnnnnnnnnnnnnnnnnnnnnnnnnnnnnnnnnnnnnnnnnnnnnnnnnnnnnnnnnnnnnnnnnnnnnnnnnnnnnnnnnnnnnnnnnnnnnnnnnnnnnnnnnnnnnnnnnnnnnnnnnnnnnnnnnnnnnnnnnnnnnnnnnnnnnnnnnnnnnnnnnnnnnnnnnnnnnnnnnnnnnnnnnnnnnnnnnnnnnnnnnnnnnnnnnnnnnnnnnnnnnnnnnnnnnnnnnnnnnnnnnnnnnnnnnnnnnnnnnnnnnnnnnnnnnnnnnnnnnnnnnnnnnnnnnnnnnnnnnnnnnnnnnnnnnnnnnnnnnnnnnnnnnnnnnnnnnnnnnnnnnnnnnnnnnnnnnnnnnnnnnnnnnnnnnnnnnnnnnnnnnnnnnnnnnnnnnnnnnnnnnnnnnnnnnnnnnnnnnnnnnnnnnnnnnnnnnnnnnnnnnnnnnnnnnnnnnnnnnnnnnnnnnnnnnnnnnnnnnnnnnnnnnnnnnnnnnnnnnnnnnnnnnnnnnnnnnnnnnnnnnnnnnnnnnnnnnnnnnnnnnnnnnnnnnnnnnnnnnnnnnnnnnnnnnnnnnnnnnnnnnnnnnnnnnnnnnnnnnnnnnnnnnnnnnnnnnnnnnnnnnnnnnnnnnnnnnnnnnnnnnnnnnnnnnnnnnnnnnnnnnnnnnnnnnnnnnnnnnnnnnnnnnnnnnnnnnnnnnnnnnnnnnnnnnnnnnnnnnnnnnnnnnnnnnnnnnnnnnnnnnnnnnnnnnnnnnnnnnnnnnnnnnnnnnnnnnnnnnnnnnnnnnnnnnnnnnnnnnnnnnnnnnnnnnnnnnnnnnnnnnnnnnnnnnnnnnnnnnnnnnnnnnnnnnnnnnnnnnnnnnnnnnnnnnnnnnnnnnnnnnnnnnnnnnnnnnnnnnnnnnnnnnnnnnnnnnnnnnnnnnnnnnnnnnnnnnnnnnnnnnnnnnnnnnnnnnnnnnnnnnnnnnnnnnnnnnnnnnnnnnnnnnnnnnnnnnnnnnnnnnnnnnnnnnnnnnnnnnnnnnnnnnnnnnnnnnnnnnnnnnnnnnnnnnnnnnnnnnnnnnnnnnnnnnnnnnnnnnnnnnnnnnnnnnnnnnnnnnnnnnnnnnnnnnnnnnnnnnnnnnnnnnnnnnnnnnnnnnnnnnnnnnnnnnnnnnnnnnnnnnnnnnnnnnnnnnnnnnnnnnnnnnnnnnnnnnnnnnnnnnnnnnnnnnnnnnnnnnnnnnnnnnnnnnnnnnnnnnnnnnnnnnnnnnnnnnnnnnnnnnnnnnnnnnnnnnnnnnnnnnnnnnnnnnnnnnnnnnnnnnnnnnnnnnnnnnnnnnnnnnnnnnnnnnnnnnnnnnnnnnnnnnnnnnnnnnnnnnnnnnnnnnnnnnnnnnnnnnnnnnnnnnnnnnnnnnnnnnnnnnnnnnnnnnnnnnnnnnnnnnnnnnnnnnnnnnnnnnnnnnnnnnnnnnnnnnnnnnnnnnnnnnnnnnnnnnnnnnnnnnnnnnnnnnnnnnnnnnnnnnnnnnnnnnnnnnnnnnnnnnnnnnnnnnnnnnnnnnnnnnnnnnnnnnnnnnnnnnnnnnnnnnnnnnnnnnnnnnnnnnnnnnnnnnnnnnnnnnnnnnnnnnnnnnnnnnnnnnnnnnnnnnnnnnnnnnnnnnnnnnnnnnnnnnnnnnnnnnnnnnnnnnnnnnnnnnnnnnnnnnnnnnnnnnnnnnnnnnnnnnnnnnnnnnnnnnnnnnnnnnnnnnnnnnnnnnnnnnnnnnnnnnnnnnnnnnnnnnnnnnnnnnnnnnnnnnnnnnnnnnnnnnnnnnnnnnnnnnnnnnnnnnnnnnnnnnnnnnnnnnnnnnnnnnnnnnnnnnnnnnnnnnnnnnnnnnnnnnnnnnnnnnnnnnnnnnnnnnnnnnnnnnnnnnnnnnnnnnnnnnnnnnnnnnnnnnnnnnnnnnnnnnnnnnnnnnnnnnnnnnnnnnnnnnnnnnnnnnnnnnnnnnnnnnnnnnnnnnnnnnnnnnnnnnnnnnnnnnnnnnnnnnnnnnnnnnnnnnnnnnnnnnnnnnnnnnnnnnnnnnnnnnnnnnnnnnnnnnnnnnnnnnnnnnnnnnnnnnnnnnnnnnnnnnnnnnnnnnnnnnnnnnnnnnnnnnnnnnnnnnnnnnnnnnnnnnnnnnnnnnnnnnnnnnnnnnnnnnnnnnnnnnnnnnnnnnnnnnnnnnnnnnnnnnnnnnnnnnnnnnnnnnnnnnnnnnnnnnnnnnnnnnnnnnnnnnnnnnnnnnnnnnnnnnnnnnnnnnnnnnnnnnnnnnnnnnnnnnnnnnnnnnnnnnnnnnnnnnnnnnnnnnnnnnnnnnnnnnnnnnnnnnnnnnnnnnnnnnnnnnnnnnnnnnnnnnnnnnnnnnnnnnnnnnnnnnnnnnnnnnnnnnnnnnnnnnnnnnnnnnnnnnnnnnnnnnnnnnnnnnnnnnnnnnnnnnnnnnnnnnnnnnnnnnnnnnnnnnnnnnnnnnnnnnnnnnnnnnnnnnnnnnnnnnnnnnnnnnnnnnnnnnnnnnnnnnnnnnnnnnnnnnnnnnnnnnnnnnnnnnnnnnnnnnnnnnnnnnnnnnnnnnnnnnnnnnnnnnnnnnnnnnnnnnnnnnnnnnnnnnnnnnnnnnnnnnnnnnnnnnnnnnnnnnnnnnnnnnnnnnnnnnnnnnnnnnnnnnnnnnnnnnnnnnnnnnnnnnnnnnnnnnnnnnnnnnnnnnnnnnnnnnnnnnnnnnnnnnnnnnnnnnnnnnnnnnnnnnnnnnnnnnnnnnnnnnnnnnnnnnnnnnnnnnnnnnnnnnnnnnnnnnnnnnnnnnnnnnnnnnnnnnnnnnnnnnnnnnnnnnnnnnnnnnnnnnnnnnnnnnnnnnnnnnnnnnnnnnnnnnnnnnnnnnnnnnnnnnnnnnnnnnnnnnnnnnnnnnnnnnnnnnnnnnnnnnnnnnnnnnnnnnnnnnnnnnnnnnnnnnnnnnnnnnnnnnnnnnnnnnnnnnnnnnnnnnnnnnnnnnnnnnnnnnnnnnnnnnnnnnnnnnnnnnnnnnnnnnnnnnnnnnnnnnnnnnnnnnnnnnnnnnnnnnnnnnnnnnnnnnnnnnnnnnnnnnnnnnnnnnnnnnnnnnnnnnnnnnnnnnnnnnnnnnnnnnnnnnnnnnnnnnnnnnnnnnnnnnnnnnnnnnnnnnnnnnnnnnnnnnnnnnnnnnnnnnnnnnnnnnnnnnnnnnnnnnnnnnnnnnnnnnnnnnnnnnnnnnnnnnnnnnnnnnnnnnnnnnnnnnnnnnnnnnnnnnnnnnnnnnnnnnnnnnnnnnnnnnnnnnnnnnnnnnnnnnnnnnnnnnnnnnnnnnnnnnnnnnnnnnnnnnnnnnnnnnnnnnnnnnnnnnnnnnnnnnnnnnnnnnnnnnnnnnnnnnnnnnnnnnnnnnnnnnnnnnnnnnnnnnnnnnnnnnnnnnnnnnnnnnnnnnnnnnnnnnnnnnnnnnnnnnnnnnnnnnnnnnnnnnnnnnnnnnnnnnnnnnnnnnnnnnnnnnnnnnnnnnnnnnnnnnnnnnnnnnnnnnnnnnnnnnnnnnnnnnnnnnnnnnnnnnnnnnnnnnnnnnnnnnnnnnnnnnnnnnnnnnnnnnnnnnnnnnnnnnnnnnnnnnnnnnnnnnnnnnnnnnnnnnnnnnnnnnnnnnnnnnnnnnnnnnnnnnnnnnnnnnnnnnnnnnnnnnnnnnnnnnnnnnnnnnnnnnnnnnnnnnnnnnnnnnnnnnnnnnnnnnnnnnnnnnnnnnnnnnnnnnnnnnnnnnnnnnnnnnnnnnnnnnnnnnnnnnnnnnnnnnnnnnnnnnnnnnnnnnnnnnnnnnnnnnnnnnnnnnnnnnnnnnnnnnnnnnnnnnnnnnnnnnnnnnnnnnnnnnnnnnnnnnnnnnnnnnnnnnnnnnnnnnnnnnnnnnnnnnnnnnnnnnnnnnnnnnnnnnnnnnnnnnnnnnnnnnnnnnnnnnnnnnnnnnnnnnnnnnnnnnnnnnnnnnnnnnnnnnnnnnnnnnnnnnnnnnnnnnnnnnnnnnnnnnnnnnnnnnnnnnnnnnnnnnnnnnnnnnnnnnnnnnnnnnnnnnnnnnnnnnnnnnnnnnnnnnnnnnnnnnnnnnnnnnnnnnnnnnnnnnnnnnnnnnnnnnnnnnnnnnnnnnnnnnnnnnnnnnnnnnnnnnnnnnnnnnnnnnnnnnnnnnnnnnnnnnnnnnnnnnnnnnnnnnnnnnnnnnnnnnnnnnnnnnnnnnnnnnnnnnnnnnnnnnnnnnnnnnnnnnnnnnnnnnnnnnnnnnnnnnnnnnnnnnnnnnnnnnnnnnnnnnnnnnnnnnnnnnnnnnnnnnnnnnnnnnnnnnnnnnnnnnnnnnnnnnnnnnnnnnnnnnnnnnnnnnnnnnnnnnnnnnnnnnnnnnnnnnnnnnnnnnnnnnnnnnnnnnnnnnnnnnnnnnnnnnnnnnnnnnnnnnnnnnnnnnnnnnnnnnnnnnnnnnnnnnnnnnnnnnnnnnnnnnnnnnnnnnnnnnnnnnnnnnnnnnnnnnnnnnnnnnnnnnnnnnnnnnnnnnnnnnnnnnnnnnnnnnnnnnnnnnnnnnnnnnnnnnnnnnnnnnnnnnnnnnnnnnnnnnnnnnnnnnnnnnnnnnnnnnnnnnnnnnnnnnnnnnnnnnnnnnnnnnnnnnnnnnnnnnnnnnnnnnnnnnnnnnnnnnnnnnnnnnnnnnnnnnnnnnnnnnnnnnnnnnnnnnnnnnnnnnnnnnnnnnnnnnnnnnnnnnnnnnnnnnnnnnnnnnnnnnnnnnnnnnnnnnnnnnnnnnnnnnnnnnnnnnnnnnnnnnnnnnnnnnnnnnnnnnnnnnnnnnnnnnnnnnnnnnnnnnnnnnnnnnnnnnnnnnnnnnnnnnnnnnnnnnnnnnnnnnnnnnnnnnnnnnnnnnnnnnnnnnnnnnnnnnnnnnnnnnnnnnnnnnnnnnnnnnnnnnnnnnnnnnnnnnnnnnnnnnnnnnnnnnnnnnnnnnnnnnnnnnnnnnnnnnnnnnnnnnnnnnnnnnnnnnnnnnnnnnnnnnnnnnnnnnnnnnnnnnnnnnnnnnnnnnnnnnnnnnnnnnnnnnnnnnnnnnnnnnnnnnnnnnnnnnnnnnnnnnnnnnnnnnnnnnnnnnnnnnnnnnnnnnnnnnnnnnnnnnnnnnnnnnnnnnnnnnnnnnnnnnnnnnnnnnnnnnnnnnnnnnnnnnnnnnnnnnnnnnnnnnnnnnnnnnnnnnnnnnnnnnnnnnnnnnnnnnnnnnnnnnnnnnnnnnnnnnnnnnnnnnnnnnnnnnnnnnnnnnnnnnnnnnnnnnnnnnnnnnnnnnnnnnnnnnnnnnnnnnnnnnnnnnnnnnnnnnnnnnnnnnnnnnnnnnnnnnnnnnnnnnnnnnnnnnnnnnnnnnnnnnnnnnnnnnnnnnnnnnnnnnnnnnnnnnnnnnnnnnnnnnnnnnnnnnnnnnnnnnnnnnnnnnnnnnnnnnnnnnnnnnnnnnnnnnnnnnnnnnnnnnnnnnnnnnnnnnnnnnnnnnnnnnnnnnnnnnnnnnnnnnnnnnnnnnnnnnnnnnnnnnnnnnnnnnnnnnnnnnnnnnnnnnnnnnnnnnnnnnnnnnnnnnnnnnnnnnnnnnnnnnnnnnnnnnnnnnnnnnnnnnnnnnnnnnnnnnnnnnnnnnnnnnnnnnnnnnnnnnnnnnnnnnnnnnnnnnnnnnnnnnnnnnnnnnnnnnnnnnnnnnnnnnnnnnnnnnnnnnnnnnnnnnnnnnnnnnnnnnnnnnnnnnnnnnnnnnnnnnnnnnnnnnnnnnnnnnnnnnnnnnnnnnnnnnnnnnnnnnnnnnnnnnnnnnnnnnnnnnnnnnnnnnnnnnnnnnnnnnnnnnnnnnnnnnnnnnnnnnnnnnnnnnnnnnnnnnnnnnnnnnnnnnnnnnnnnnnnnnnnnnnnnnnnnnnnnnnnnnnnnnnnnnnnnnnnnnnnnnnnnnnnnnnnnnnnnnnnnnnnnnnnnnnnnnnnnnnnnnnnnnnnnnnnnnnnnnnnnnnnnnnnnnnnnnnnnnnnnnnnnnnnnnnnnnnnnnnnnnnnnnnnnnnnnnnnnnnnnnnnnnnnnnnnnnnnnnnnnnnnnnnnnnnnnnnnnnnnnnnnnnnnnnnnnnnnnnnnnnnnnnnnnnnnnnnnnnnnnnnnnnnnnnnnnnnnnnnnnnnnnnnnnnnnnnnnnnnnnnnnnnnnnnnnnnnnnnnnnnnnnnnnnnnnnnnnnnnnnnnnnnnnnnnnnnnnnnnnnnnnnnnnnnnnnnnnnnnnnnnnnnnnnnnnnnnnnnnnnnnnnnnnnnnnnnnnnnnnnnnnnnnnnnnnnnnnnnnnnnnnnnnnnnnnnnnnnnnnnnnnnnnnnnnnnnnnnnnnnnnnnnnnnnnnnnnnnnnnnnnnnnnnnnnnnnnnnnnnnnnnnnnnnnnnnnnnnnnnnnnnnnnnnnnnnnnnnnnnnnnnnnnnnnnnnnnnnnnnnnnnnnnnnnnnnnnnnnnnnnnnnnnnnnnnnnnnnnnnnnnnnnnnnnnnnnnnnnnnnnnnnnnnnnnnnnnnnnnnnnnnnnnnnnnnnnnnnnnnnnnnnnnnnnnnnnnnnnnnnnnnnnnnnnnnnnnnnnnnnnnnnnnnnnnnnnnnnnnnnnnnnnnnnnnnnnnnnnnnnnnnnnnnnnnnnnnnnnnnnnnnnnnnnnnnnnnnnnnnnnnnnnnnnnnnnnnnnnnnnnnnnnnnnnnnnnnnnnnnnnnnnnnnnnnnnnnnnnnnnnnnnnnnnnnnnnnnnnnnnnnnnnnnnnnnnnnnnnnnnnnnnnnnnnnnnnnnnnnnnnnnnnnnnnnnnnnnnnnnnnnnnnnnnnnnnnnnnnnnnnnnnnnnnnnnnnnnnnnnnnnnnnnnnnnnnnnnnnnnnnnnnnnnnnnnnnnnnnnnnnnnnnnnnnnnnnnnnnnnnnnnnnnnnnnnnnnnnnnnnnnnnnnnnnnnnnnnnnnnnnnnnnnnnnnnnnnnnnnnnnnnnnnnnnnnnnnnnnnnnnnnnnnnnnnnnnnnnnnnnnnnnnnnnnnnnnnnnnnnnnnnnnnnnnnnnnnnnnnnnnnnnnnnnnnnnnnnnnnnnnnnnnnnnnnnnnnnnnnnnnnnnnnnnnnnnnnnnnnnnnnnnnnnnnnnnnnnnnnnnnnnnnnnnnnnnnnnnnnnnnnnnnnnnnnnnnnnnnnnnnnnnnnnnnnnnnnnnnnnnnnnnnnnnnnnnnnnnnnnnnnnnnnnnnnnnnnnnnnnnnnnnnnnnnnnnnnnnnnnnnnnnnnnnnnnnnnnnnnnnnnnnnnnnnnnnnnnnnnnnnnnnnnnnnnnnnnnnnnnnnnnnnnnnnnnnnnnnnnnnnnnnnnnnnnnnnnnnnnnnnnnnnnnnnnnnnnnnnnnnnnnnnnnnnnnnnnnnnnnnnnnnnnnnnnnnnnnnnnnnnnnnnnnnnnnnnnnnnnnnnnnnnnnnnnnnnnnnnnnnnnnnnnnnnnnnnnnnnnnnnnnnnnnnnnnnnnnnnnnnnnnnnnnnnnnnnnnnnnnnnnnnnnnnnnnnnnnnnnnnnnnnnnnnnnnnnnnnnnnnnnnnnnnnnnnnnnnnnnnnnnnnnnnnnnnnnnnnnnnnnnnnnnnnnnnnnnnnnnnnnnnnnnnnnnnnnnnnnnnnnnnnnnnnnnnnnnnnnnnnnnnnnnnnnnnnnnnnnnnnnnnnnnnnnnnnnnnnnnnnnnnnnnnnnnnnnnnnnnnnnnnnnnnnnnnnnnnnnnnnnnnnnnnnnnnnnnnnnnnnnnnnnnnnnnnnnnnnnnnnnnnnnnnnnnnnnnnnnnnnnnnnnnnnnnnnnnnnnnnnnnnnnnnnnnnnnnnnnnnnnnnnnnnnnnnnnnnnnnnnnnnnnnnnnnnnnnnnnnnnnnnnnnnnnnnnnnnnnnnnnnnnnnnnnnnnnnnnnnnnnnnnnnnnnnnnnnnnnnnnnnnnnnnnnnnnnnnnnnnnnnnnnnnnnnnnnnnnnnnnnnnnnnnnnnnnnnnnnnnnnnnnnnnnnnnnnnnnnnnnnnnnnnnnnnnnnnnnnnnnnnnnnnnnnnnnnnnnnnnnnnnnnnnnnnnnnnnnnnnnnnnnnnnnnnnnnnnnnnnnnnnnnnnnnnnnnnnnnnnnnnnnnnnnnnnnnnnnnnnnnnnnnnnnnnnnnnnnnnnnnnnnnnnnnnnnnnnnnnnnnnnnnnnnnnnnnnnnnnnnnnnnnnnnnnnnnnnnnnnnnnnnnnnnnnnnnnnnnnnnnnnnnnnnnnnnnnnnnnnnnnnnnnnnnnnnnnnnnnnnnnnnnnnnnnnnnnnnnnnnnnnnnnnnnnnnnnnnnnnnnnnnnnnnnnnnnnnnnnnnnnnnnnnnnnnnnnnnnnnnnnnnnnnnnnnnnnnnnnnnnnnnnnnnnnnnnnnnnnnnnnnnnnnnnnnnnnnnnnnnnnnnnnnnnnnnnnnnnnnnnnnnnnnnnnnnnnnnnnnnnnnnnnnnnnnnnnnnnnnnnnnnnnnnnnnnnnnnnnnnnnnnnnnnnnnnnnnnnnnnnnnnnnnnnnnnnnnnnnnnnnnnnnnnnnnnnnnnnnnnnnnnnnnnnnnnnnnnnnnnnnnnnnnnnnnnnnnnnnnnnnnnnnnnnnnnnnnnnnnnnnnnnnnnnnnnnnnnnnnnnnnnnnnnnnnnnnnnnnnnnnnnnnnnnnnnnnnnnnnnnnnnnnnnnnnnnnnnnnnnnnnnnnnnnnnnnnnnnnnnnnnnnnnnnnnnnnnnnnnnnnnnnnnnnnnnnnnnnnnnnnnnnnnnnnnnnnnnnnnnnnnnnnnnnnnnnnnnnnnnnnnnnnnnnnnnnnnnnnnnnnnnnnnnnnnnnnnnnnnnnnnnnnnnnnnnnnnnnnnnnnnnnnnnnnnnnnnnnnnnnnnnnnnnnnnnnnnnnnnnnnnnnnnnnnnnnnnnnnnnnnnnnnnnnnnnnnnnnnnnnnnnnnnnnnnnnnnnnnnnnnnnnnnnnnnnnnnnnnnnnnnnnnnnnnnnnnnnnnnnnnnnnnnnnnnnnnnnnnnnnnnnnnnnnnnnnnnnnnnnnnnnnnnnnnnnnnnnnnnnnnnnnnnnnnnnnnnnnnnnnnnnnnnnnnnnnnnnnnnnnnnnnnnnnnnnnnnnnnnnnnnnnnnnnnnnnnnnnnnnnnnnnnnnnnnnnnnnnnnnnnnnnnnnnnnnnnnnnnnnnnnnnnnnnnnnnnnnnnnnnnnnnnnnnnnnnnnnnnnnnnnnnnnnnnnnnnnnnnnnnnnnnnnnnnnnnnnnnnnnnnnnnnnnnnnnnnnnnnnnnnnnnnnnnnnnnnnnnnnnnnnnnnnnnnnnnnnnnnnnnnnnnnnnnnnnnnnnnnnnnnnnnnnnnnnnnnnnnnnnnnnnnnnnnnnnnnnnnnnnnnnnnnnnnnnnnnnnnnnnnnnnnnnnnnnnnnnnnnnnnnnnnnnnnnnnnnnnnnnnnnnnnnnnnnnnnnnnnnnnnnnnnnnnnnnnnnnnnnnnnnnnnnnnnnnnnnnnnnnnnnnnnnnnnnnnnnnnnnnnnnnnnnnnnnnnnnnnnnnnnnnnnnnnnnnnnnnnnnnnnnnnnnnnnnnnnnnnnnnnnnnnnnnnnnnnnnnnnnnnnnnnnnnnnnnnnnnnnnnnnnnnnnnnnnnnnnnnnnnnnnnnnnnnnnnnnnnnnnnnnnnnnnnnnnnnnnnnnnnnnnnnnnnnnnnnnnnnnnnnnnnnnnnnnnnnnnnnnnnnnnnnnnnnnnnnnnnnnnnnnnnnnnnnnnnnnnnnnnnnnnnnnnnnnnnnnnnnnnnnnnnnnnnnnnnnnnnnnnnnnnnnnnnnnnnnnnnnnnnnnnnnnnnnnnnnnnnnnnnnnnnnnnnnnnnnnnnnnnnnnnnnnnnnnnnnnnnnnnnnnnnnnnnnnnnnnnnnnnnnnnnnnnnnnnnnnnnnnnnnnnnnnnnnnnnnnnnnnnnnnnnnnnnnnnnnnnnnnnnnnnnnnnnnnnnnnnnnnnnnnnnnnnnnnnnnnnnnnnnnnnnnnnnnnnnnnnnnnnnnnnnnnnnnnnnnnnnnnnnnnnnnnnnnnnnnnnnnnnnnnnnnnnnnnnnnnnnnnnnnnnnnnnnnnnnnnnnnnnnnnnnnnnnnnnnnnnnnnnnnnnnnnnnnnnnnnnnnnnnnnnnnnnnnnnnnnnnnnnnnnnnnnnnnnnnnnnnnnnnnnnnnnnnnnnnnnnnnnnnnnnnnnnnnnnnnnnnnnnnnnnnnnnnnnnnnnnnnnnnnnnnnnnnnnnnnnnnnnnnnnnnnnnnnnnnnnnnnnnnnnnnnnnnnnnnnnnnnnnnnnnnnnnnnnnnnnnnnnnnnnnnnnnnnnnnnnnnnnnnnnnnnnnnnnnnnnnnnnnnnnnnnnnnnnnnnnnnnnnnnnnnnnnnnnnnnnnnnnnnnnnnnnnnnnnnnnnnnnnnnnnnnnnnnnnnnnnnnnnnnnnnnnnnnnnnnnnnnnnnnnnnnnnnnnnnnnnnnnnnnnnnnnnnnnnnnnnnnnnnnnnnnnnnnnnnnnnnnnnnnnnnnnnnnnnnnnnnnnnnnnnnnnnnnnnnnnnnnnnnnnnnnnnnnnnnnnnnnnnnnnnnnnnnnnnnnnnnnnnnnnnnnnnnnnnnnnnnnnnnnnnnnnnnnnnnnnnnnnnnnnnnnnnnnnnnnnnnnnnnnnnnnnnnnnnnnnnnnnnnnnnnnnnnnnnnnnnnnnnnnnnnnnnnnnnnnnnnnnnnnnnnnnnnnnnnnnnnnnnnnnnnnnnnnnnnnnnnnnnnnnnnnnnnnnnnnnnnnnnnnnnnnnnnnnnnnnnnnnnnnnnnnnnnnnnnnnnnnnnnnnnnnnnnnnnnnnnnnnnnnnnnnnnnnnnnnnnnnnnnnnnnnnnnnnnnnnnnnnnnnnnnnnnnnnnnnnnnnnnnnnnnnnnnnnnnnnnnnnnnnnnnnnnnnnnnnnnnnnnnnnnnnnnnnnnnnnnnnnnnnnnnnnnnnnnnnnnnnnnnnnnnnnnnnnnnnnnnnnnnnnnnnnnnnnnnnnnnnnnnnnnnnnnnnnnnnnnnnnnnnnnnnnnnnnnnnnnnnnnnnnnnnnnnnnnnnnnnnnnnnnnnnnnnnnnnnnnnnnnnnnnnnnnnnnnnnnnnnnnnnnnnnnnnnnnnnnnnnnnnnnnnnnnnnnnnnnnnnnnnnnnnnnnnnnnnnnnnnnnnnnnnnnnnnnnnnnnnnnnnnnnnnnnnnnnnnnnnnnnnnnnnnnnnnnnnnnnnnnnnnnnnnnnnnnnnnnnnnnnnnnnnnnnnnnnnnnnnnnnnnnnnnnnnnnnnnnnnnnnnnnnnnnnnnnnnnnnnnnnnnnnnnnnnnnnnnnnnnnnnnnnnnnnnnnnnnnnnnnnnnnnnnnnnnnnnnnnnnnnnnnnnnnnnnnnnnnnnnnnnnnnnnnnnnnnnnnnnnnnnnnnnnnnnnnnnnnnnnnnnnnnnnnnnnnnnnnnnnnnnnnnnnnnnnnnnnnnnnnnnnnnnnnnnnnnnnnnnnnnnnnnnnnnnnnnnnnnnnnnnnnnnnnnnnnnnnnnnnnnnnnnnnnnnnnnnnnnnnnnnnnnnnnnnnnnnnnnnnnnnnnnnnnnnnnnnnnnnnnnnnnnnnnnnnnnnnnnnnnnnnnnnnnnnnnnnnnnnnnnnnnnnnnnnnnnnnnnnnnnnnnnnnnnnnnnnnnnnnnnnnnnnnnnnnnnnnnnnnnnnnnnnnnnnnnnnnnnnnnnnnnnnnnnnnnnnnnnnnnnnnnnnnnnnnnnnnnnnnnnnnnnnnnnnnnnnnnnnnnnnnnnnnnnnnnnnnnnnnnnnnnnnnnnnnnnnnnnnnnnnnnnnnnnnnnnnnnnnnnnnnnnnnnnnnnnnnnnnnnnnnnnnnnnnnnnnnnnnnnnnnnnnnnnnnnnnnnnnnnnnnnnnnnnnnnnnnnnnnnnnnnnnnnnnnnnnnnnnnnnnnnnnnnnnnnnnnnnnnnnnnnnnnnnnnnnnnnnnnnnnnnnnnnnnnnnnnnnnnnnnnnnnnnnnnnnnnnnnnnnnnnnnnnnnnnnnnnnnnnnnnnnnnnnnnnnnnnnnnnnnnnnnnnnnnnnnnnnnnnnnnnnnnnnnnnnnnnnnnnnnnnnnnnnnnnnnnnnnnnnnnnnnnnnnnnnnnnnnnnnnnnnnnnnnnnnnnnnnnnnnnnnnnnnnnnnnnnnnnnnnnnnnnnnnnnnnnnnnnnnnnnnnnnnnnnnnnnnnnnnnnnnnnnnnnnnnnnnnnnnnnnnnnnnnnnnnnnnnnnnnnnnnnnnnnnnnnnnnnnnnnnnnnnnnnnnnnnnnnnnnnnnnnnnnnnnnnnnnnnnnnnnnnnnnnnnnnnnnnnnnnnnnnnnnnnnnnnnnnnnnnnnnnnnnnnnnnnnnnnnnnnnnnnnnnnnnnnnnnnnnnnnnnnnnnnnnnnnnnnnnnnnnnnnnnnnnnnnnnnnnnnnnnnnnnnnnnnnnnnnnnnnnnnnnnnnnnnnnnnnnnnnnnnnnnnnnnnnnnnnnnnnnnnnnnnnnnnnnnnnnnnnnnnnnnnnnnnnnnnnnnnnnnnnnnnnnnnnnnnnnnnnnnnnnnnnnnnnnnnnnnnnnnnnnnnnnnnnnnnnnnnnnnnnnnnnnnnnnnnnnnnnnnnnnnnnnnnnnnnnnnnnnnnnnnnnnnnnnnnnnnnnnnnnnnnnnnnnnnnnnnnnnnnnnnnnnnnnnnnnnnnnnnnnnnnnnnnnnnnnnnnnnnnnnnnnnnnnnnnnnnnnnnnnnnnnnnnnnnnnnnnnnnnnnnnnnnnnnnnnnnnnnnnnnnnnnnnnnnnnnnnnnnnnnnnnnnnnnnnnnnnnnnnnnnnnnnnnnnnnnnnnnnnnnnnnnnnnnnnnnnnnnnnnnnnnnnnnnnnnnnnnnnnnnnnnnnnnnnnnnnnnnnnnnnnnnnnnnnnnnnnnnnnnnnnnnnnnnnnnnnnnnnnnnnnnnnnnnnnnnnnnnnnnnnnnnnnnnnnnnnnnnnnnnnnnnnnnnnnnnnnnnnnnnnnnnnnnnnnnnnnnnnnnnnnnnnnnnnnnnnnnnnnnnnnnnnnnnnnnnnnnnnnnnnnnnnnnnnnnnnnnnnnnnnnnnnnnnnnnnnnnnnnnnnnnnnnnnnnnnnnnnnnnnnnnnnnnnnnnnnnnnnnnnnnnnnnnnnnnnnnnnnnnnnnnnnnnnnnnnnnnnnnnnnnnnnnnnnnnnnnnnnnnnnnnnnnnnnnnnnnnnnnnnnnnnnnnnnnnnnnnnnnnnnnnnnnnnnnnnnnnnnnnnnnnnnnnnnnnnnnnnnnnnnnnnnnnnnnnnnnnnnnnnnnnnnnnnnnnnnnnnnnnnnnnnnnnnnnnnnnnnnnnnnnnnnnnnnnnnnnnnnnnnnnnnnnnnnnnnnnnnnnnnnnnnnnnnnnnnnnnnnnnnnnnnnnnnnnnnnnnnnnnnnnnnnnnnnnnnnnnnnnnnnnnnnnnnnnnnnnnnnnnnnnnnnnnnnnnnnnnnnnnnnnnnnnnnnnnnnnnnnnnnnnnnnnnnnnnnnnnnnnnnnnnnnnnnnnnnnnnnnnnnnnnnnnnnnnnnnnnnnnnnnnnnnnnnnnnnnnnnnnnnnnnnnnnnnnnnnnnnnnnnnnnnnnnnnnnnnnnnnnnnnnnnnnnnnnnnnnnnnnnnnnnnnnnnnnnnnnnnnnnnnnnnnnnnnnnnnnnnnnnnnnnnnnnnnnnnnnnnnnnnnnnnnnnnnnnnnnnnnnnnnnnnnnnnnnnnnnnnnnnnnnnnnnnnnnnnnnnnnnnnnnnnnnnnnnnnnnnnnnnnnnnnnnnnnnnnnnnnnnnnnnnnnnnnnnnnnnnnnnnnnnnnnnnnnnnnnnnnnnnnnnnnnnnnnnnnnnnnnnnnnnnnnnnnnnnnnnnnnnnnnnnnnnnnnnnnnnnnnnnnnnnnnnnnnnnnnnnnnnnnnnnnnnnnnnnnnnnnnnnnnnnnnnnnnnnnnnnnnnnnnnnnnnnnnnnnnnnnnnnnnnnnnnnnnnnnnnnnnnnnnnnnnnnnnnnnnnnnnnnnnnnnnnnnnnnnnnnnnnnnnnnnnnnnnnnnnnnnnnnnnnnnnnnnnnnnnnnnnnnnnnnnnnnnnnnnnnnnnnnnnnnnnnnnnnnnnnnnnnnnnnnnnnnnnnnnnnnnnnnnnnnnnnnnnnnnnnnnnnnnnnnnnnnnnnnnnnnnnnnnnnnnnnnnnnnnnnnnnnnnnnnnnnnnnnnnnnnnnnnnnnnnnnnnnnnnnnnnnnnnnnnnnnnnnnnnnnnnnnnnnnnnnnnnnnnnnnnnnnnnnnnnnnnnnnnnnnnnnnnnnnnnnnnnnnnnnnnnnnnnnnnnnnnnnnnnnnnnnnnnnnnnnnnnnnnnnnnnnnnnnnnnnnnnnnnnnnnnnnnnnnnnnnnnnnnnnnnnnnnnnnnnnnnnnnnnnnnnnnnnnnnnnnnnnnnnnnnnnnnnnnnnnnnnnnnnnnnnnnnnnnnnnnnnnnnnnnnnnnnnnnnnnnnnnnnnnnnnnnnnnnnnnnnnnnnnnnnnnnnnnnnnnnnnnnnnnnnnnnnnnnnnnnnnnnnnnnnnnnnnnnnnnnnnnnnnnnnnnnnnnnnnnnnnnnnnnnnnnnnnnnnnnnnnnnnnnnnnnnnnnnnnnnnnnnnnnnnnnnnnnnnnnnnnnnnnnnnnnnnnnnnnnnnnnnnnnnnnnnnnnnnnnnnnnnnnnnnnnnnnnnnnnnnnnnnnnnnnnnnnnnnnnnnnnnnnnnnnnnnnnnnnnnnnnnnnnnnnnnnnnnnnnnnnnnnnnnnnnnnnnnnnnnnnnnnnnnnnnnnnnnnnnnnnnnnnnnnnnnnnnnnnnnnnnnnnnnnnnnnnnnnnnnnnnnnnnnnnnnnnnnnnnnnnnnnnnnnnnnnnnnnnnnnnnnnnnnnnnnnnnnnnnnnnnnnnnnnnnnnnnnnnnnnnnnnnnnnnnnnnnnnnnnnnnnnnnnnnnnnnnnnnnnnnnnnnnnnnnnnnnnnnnnnnnnnnnnnnnnnnnnnnnnnnnnnnnnnnnnnnnnnnnnnnnnnnnnnnnnnnnnnnnnnnnnnnnnnnnnnnnnnnnnnnnnnnnnnnnnnnnnnnnnnnnnnnnnnnnnnnnnnnnnnnnnnnnnnnnnnnnnnnnnnnnnnnnnnnnnnnnnnnnnnnnnnnnnnnnnnnnnnnnnnnnnnnnnnnnnnnnnnnnnnnnnnnnnnnnnnnnnnnnnnnnnnnnnnnnnnnnnnnnnnnnnnnnnnnnnnnnnnnnnnnnnnnnnnnnnnnnnnnnnnnnnnnnnnnnnnnnnnnnnnnnnnnnnnnnnnnnnnnnnnnnnnnnnnnnnnnnnnnnnnnnnnnnnnnnnnnnnnnnnnnnnnnnnnnnnnnnnnnnnnnnnnnnnnnnnnnnnnnnnnnnnnnnnnnnnnnnnnnnnnnnnnnnnnnnnnnnnnnnnnnnnnnnnnnnnnnnnnnnnnnnnnnnnnnnnnnnnnnnnnnnnnnnnnnnnnnnnnnnnnnnnnnnnnnnnnnnnnnnnnnnnnnnnnnnnnnnnnnnnnnnnnnnnnnnnnnnnnnnnnnnnnnnnnnnnnnnnnnnnnnnnnnnnnnnnnnnnnnnnnnnnnnnnnnnnnnnnnnnnnnnnnnnnnnnnnnnnnnnnnnnnnnnnnnnnnnnnnnnnnnnnnnnnnnnnnnnnnnnnnnnnnnnnnnnnnnnnnnnnnnnnnnnnnnnnnnnnnnnnnnnnnnnnnnnnnnnnnnnnnnnnnnnnnnnnnnnnnnnnnnnnnnnnnnnnnnnnnnnnnnnnnnnnnnnnnnnnnnnnnnnnnnnnnnnnnnnnnnnnnnnnnnnnnnnnnnnnnnnnnnnnnnnnnnnnnnnnnnnnnnnnnnnnnnnnnnnnnnnnnnnnnnnnnnnnnnnnnnnnnnnnnnnnnnnnnnnnnnnnnnnnnnnnnnnnnnnnnnnnnnnnnnnnnnnnnnnnnnnnnnnnnnnnnnnnnnnnnnnnnnnnnnnnnnnnnnnnnnnnnnnnnnnnnnnnnnnnnnnnnnnnnnnnnnnnnnnnnnnnnnnnnnnnnnnnnnnnnnnnnnnnnnnnnnnnnnnnnnnnnnnnnnnnnnnnnnnnnnnnnnnnnnnnnnnnnnnnnnnnnnnnnnnnnnnnnnnnnnnnnnnnnnnnnnnnnnnnnnnnnnnnnnnnnnnnnnnnnnnnnnnnnnnnnnnnnnnnnnnnnnnnnnnnnnnnnnnnnnnnnnnnnnnnnnnnnnnnnnnnnnnnnnnnnnnnnnnnnnnnnnnnnnnnnnnnnnnnnnnnnnnnnnnnnnnnnnnnnnnnnnnnnnnnnnnnnnnnnnnnnnnnnnnnnnnnnnnnnnnnnnnnnnnnnnnnnnnnnnnnnnnnnnnnnnnnnnnnnnnnnnnnnnnnnnnnnnnnnnnnnnnnnnnnnnnnnnnnnnnnnnnnnnnnnnnnnnnnnnnnnnnnnnnnnnnnnnnnnnnnnnnnnnnnnnnnnnnnnnnnnnnnnnnnnnnnnnnnnnnnnnnnnnnnnnnnnnnnnnnnnnnnnnnnnnnnnnnnnnnnnnnnnnnnnnnnnnnnnnnnnnnnnnnnnnnnnnnnnnnnnnnnnnnnnnnnnnnnnnnnnnnnnnnnnnnnnnnnnnnnnnnnnnnnnnnnnnnnnnnnnnnnnnnnnnnnnnnnnnnnnnnnnnnnnnnnnnnnnnnnnnnnnnnnnnnnnnnnnnnnnnnnnnnnnnnnnnnnnnnnnnnnnnnnnnnnnnnnnnnnnnnnnnnnnnnnnnnnnnnnnnnnnnnnnnnnnnnnnnnnnnnnnnnnnnnnnnnnnnnnnnnnnnnnnnnnnnnnnnnnnnnnnnnnnnnnnnnnnnnnnnnnnnnnnnnnnnnnnnnnnnnnnnnnnnnnnnnnnnnnnnnnnnnnnnnnnnnnnnnnnnnnnnnnnnnnnnnnnnnnnnnnnnnnnnnnnnnnnnnnnnnnnnnnnnnnnnnnnnnnnnnnnnnnnnnnnnnnnnnnnnnnnnnnnnnnnnnnnnnnnnnnnnnnnnnnnnnnnnnnnnnnnnnnnnnnnnnnnnnnnnnnnnnnnnnnnnnnnnnnnnnnnnnnnnnnnnnnnnnnnnnnnnnnnnnnnnnnnnnnnnnnnnnnnnnnnnnnnnnnnnnnnnnnnnnnnnnnnnnnnnnnnnnnnnnnnnnnnnnnnnnnnnnnnnnnnnnnnnnnnnnnnnnnnnnnnnnnnnnnnnnnnnnnnnnnnnnnnnnnnnnnnnnnnnnnnnnnnnnnnnnnnnnnnnnnnnnnnnnnnnnnnnnnnnnnnnnnnnnnnnnnnnnnnnnnnnnnnnnnnnnnnnnnnnnnnnnnnnnnnnnnnnnnnnnnnnnnnnnnnnnnnnnnnnnnnnnnnnnnnnnnnnnnnnnnnnnnnnnnnnnnnnnnnnnnnnnnnnnnnnnnnnnnnnnnnnnnnnnnnnnnnnnnnnnnnnnnnnnnnnnnnnnnnnnnnnnnnnnnnnnnnnnnnnnnnnnnnnnnnnnnnnnnnnnnnnnnnnnnnnnnnnnnnnnnnnnnnnnnnnnnnnnnnnnnnnnnnnnnnnnnnnnnnnnnnnnnnnnnnnnnnnnnnnnnnnnnnnnnnnnnnnnnnnnnnnnnnnnnnnnnnnnnnnnnnnnnnnnnnnnnnnnnnnnnnnnnnnnnnnnnnnnnnnnnnnnnnnnnnnnnnnnnnnnnnnnnnnnnnnnnnnnnnnnnnnnnnnnnnnnnnnnnnnnnnnnnnnnnnnnnnnnnnnnnnnnnnnnnnnnnnnnnnnnnnnnnnnnnnnnnnnnnnnnnnnnnnnnnnnnnnnnnnnnnnnnnnnnnnnnnnnnnnnnnnnnnnnnnnnnnnnnnnnnnnnnnnnnnnnnnnnnnnnnnnnnnnnnnnnnnnnnnnnnnnnnnnnnnnnnnnnnnnnnnnnnnnnnnnnnnnnnnnnnnnnnnnnnnnnnnnnnnnnnnnnnnnnnnnnnnnnnnnnnnnnnnnnnnnnnnnnnnnnnnnnnnnnnnnnnnnnnnnnnnnnnnnnnnnnnnnnnnnnnnnnnnnnnnnnnnnnnnnnnnnnnnnnnnnnnnnnnnnnnnnnnnnnnnnnnnnnnnnnnnnnnnnnnnnnnnnnnnnnnnnnnnnnnnnnnnnnnnnnnnnnnnnnnnnnnnnnnnnnnnnnnnnnnnnnnnnnnnnnnnnnnnnnnnnnnnnnnnnnnnnnnnnnnnnnnnnnnnnnnnnnnnnnnnnnnnnnnnnnnnnnnnnnnnnnnnnnnnnnnnnnnnnnnnnnnnnnnnnnnnnnnnnnnnnnnnnnnnnnnnnnnnnnnnnnnnnnnnnnnnnnnnnnnnnnnnnnnnnnnnnnnnnnnnnnnnnnnnnnnnnnnnnnnnnnnnnnnnnnnnnnnnnnnnnnnnnnnnnnnnnnnnnnnnnnnnnnnnnnnnnnnnnnnnnnnnnnnnnnnnnnnnnnnnnnnnnnnnnnnnnnnnnnnnnnnnnnnnnnnnnnnnnnnnnnnnnnnnnnnnnnnnnnnnnnnnnnnnnnnnnnnnnnnnnnnnnnnnnnnnnnnnnnnnnnnnnnnnnnnnnnnnnnnnnnnnnnnnnnnnnnnnnnnnnnnnnnnnnnnnnnnnnnnnnnnnnnnnnnnnnnnnnnnnnnnnnnnnnnnnnnnnnnnnnnnnnnnnnnnnnnnnnnnnnnnnnnnnnnnnnnnnnnnnnnnnnnnnnnnnnnnnnnnnnnnnnnnnnnnnnnnnnnnnnnnnnnnnnnnnnnnnnnnnnnnnnnnnnnnnnnnnnnnnnnnnnnnnnnnnnnnnnnnnnnnnnnnnnnnnnnnnnnnnnnnnnnnnnnnnnnnnnnnnnnnnnnnnnnnnnnnnnnnnnnnnnnnnnnnnnnnnnnnnnnnnnnnnnnnnnnnnnnnnnnnnnnnnnnnnnnnnnnnnnnnnnnnnnnnnnnnnnnnnnnnnnnnnnnnnnnnnnnnnnnnnnnnnnnnnnnnnnnnnnnnnnnnnnnnnnnnnnnnnnnnnnnnnnnnnnnnnnnnnnnnnnnnnnnnnnnnnnnnnnnnnnnnnnnnnnnnnnnnnnnnnnnnnnnnnnnnnnnnnnnnnnnnnnnnnnnnnnnnnnnnnnnnnnnnnnnnnnnnnnnnnnnnnnnnnnnnnnnnnnnnnnnnnnnnnnnnnnnnnnnnnnnnnnnnnnnnnnnnnnnnnnnnnnnnnnnnnnnnnnnnnnnnnnnnnnnnnnnnnnnnnnnnnnnnnnnnnnnnnnnnnnnnnnnnnnnnnnnnnnnnnnnnnnnnnnnnnnnnnnnnnnnnnnnnnnnnnnnnnnnnnnnnnnnnnnnnnnnnnnnnnnnnnnnnnnnnnnnnnnnnnnnnnnnnnnnnnnnnnnnnnnnnnnnnnnnnnnnnnnnnnnnnnnnnnnnnnnnnnnnnnnnnnnnnnnnnnnnnnnnnnnnnnnnnnnnnnnnnnnnnnnnnnnnnnnnnnnnnnnnnnnnnnnnnnnnnnnnnnnnnnnnnnnnnnnnnnnnnnnnnnnnnnnnnnnnnnnnnnnnnnnnnnnnnnnnnnnnnnnnnnnnnnnnnnnnnnnnnnnnnnnnnnnnnnnnnnnnnnnnnnnnnnnnnnnnnnnnnnnnnnnnnnnnnnnnnnnnnnnnnnnnnnnnnnnnnnnnnnnnnnnnnnnnnnnnnnnnnnnnnnnnnnnnnnnnnnnnnnnnnnnnnnnnnnnnnnnnnnnnnnnnnnnnnnnnnnnnnnnnnnnnnnnnnnnnnnnnnnnnnnnnnnnnnnnnnnnnnnnnnnnnnnnnnnnnnnnnnnnnnnnnnnnnnnnnnnnnnnnnnnnnnnnnnnnnnnnnnnnnnnnnnnnnnnnnnnnnnnnnnnnnnnnnnnnnnnnnnnnnnnnnnnnnnnnnnnnnnnnnnnnnnnnnnnnnnnnnnnnnnnnnnnnnnnnnnnnnnnnnnnnnnnnnnnnnnnnnnnnnnnnnnnnnnnnnnnnnnnnnnnnnnnnnnnnnnnnnnnnnnnnnnnnnnnnnnnnnnnnnnnnnnnnnnnnnnnnnnnnnnnnnnnnnnnnnnnnnnnnnnnnnnnnnnnnnnnnnnnnnnnnnnnnnnnnnnnnnnnnnnnnnnnnnnnnnnnnnnnnnnnnnnnnnnnnnnnnnnnnnnnnnnnnnnnnnnnnnnnnnnnnnnnnnnnnnnnnnnnnnnnnnnnnnnnnnnnnnnnnnnnnnnnnnnnnnnnnnnnnnnnnnnnnnnnnnnnnnnnnnnnnnnnnnnnnnnnnnnnnnnnnnnnnnnnnnnnnnnnnnnnnnnnnnnnnnnnnnnnnnnnnnnnnnnnnnnnnnnnnnnnnnnnnnnnnnnnnnnnnnnnnnnnnnnnnnnnnnnnnnnnnnnnnnnnnnnnnnnnnnnnnnnnnnnnnnnnnnnnnnnnnnnnnnnnnnnnnnnnnnnnnnnnnnnnnnnnnnnnnnnnnnnnnnnnnnnnnnnnnnnnnnnnnnnnnnnnnnnnnnnnnnnnnnnnnnnnnnnnnnnnnnnnnnnnnnnnnnnnnnnnnnnnnnnnnnnnnnnnnnnnnnnnnnnnnnnnnnnnnnnnnnnnnnnnnnnnnnnnnnnnnnnnnnnnnnnnnnnnnnnnnnnnnnnnnnnnnnnnnnnnnnnnnnnnnnnnnnnnnnnnnnnnnnnnnnnnnnnnnnnnnnnnnnnnnnnnnnnnnnnnnnnnnnnnnnnnnnnnnnnnnnnnnnnnnnnnnnnnnnnnnnnnnnnnnnnnnnnnnnnnnnnnnnnnnnnnnnnnnnnnnnnnnnnnnnnnnnnnnnnnnnnnnnnnnnnnnnnnnnnnnnnnnnnnnnnnnnnnnnnnnnnnnnnnnnnnnnnnnnnnnnnnnnnnnnnnnnnnnnnnnnnnnnnnnnnnnnnnnnnnnnnnnnnnnnnnnnnnnnnnnnnnnnnnnnnnnnnnnnnnnnnnnnnnnnnnnnnnnnnnnnnnnnnnnnnnnnnnnnnnnnnnnnnnnnnnnnnnnnnnnnnnnnnnnnnnnnnnnnnnnnnnnnnnnnnnnnnnnnnnnnnnnnnnnnnnnnnnnnnnnnnnnnnnnnnnnnnnnnnnnnnnnnnnnnnnnnnnnnnnnnnnnnnnnnnnnnnnnnnnnnnnnnnnnnnnnnnnnnnnnnnnnnnnnnnnnnnnnnnnnnnnnnnnnnnnnnnnnnnnnnnnnnnnnnnnnnnnnnnnnnnnnnnnnnnnnnnnnnnnnnnnnnnnnnnnnnnnnnnnnnnnnnnnnnnnnnnnnnnnnnnnnnnnnnnnnnnnnnnnnnnnnnnnnnnnnnnnnnnnnnnnnnnnnnnnnnnnnnnnnnnnnnnnnnnnnnnnnnnnnnnnnnnnnnnnnnnnnnnnnnnnnnnnnnnnnnnnnnnnnnnnnnnnnnnnnnnnnnnnnnnnnnnnnnnnnnnnnnnnnnnnnnnnnnnnnnnnnnnnnnnnnnnnnnnnnnnnnnnnnnnnnnnnnnnnnnnnnnnnnnnnnnnnnnnnnnnnnnnnnnnnnnnnnnnnnnnnnnnnnnnnnnnnnnnnnnnnnnnnnnnnnnnnnnnnnnnnnnnnnnnnnnnnnnnnnnnnnnnnnnnnnnnnnnnnnnnnnnnnnnnnnnnnnnnnnnnnnnnnnnnnnnnnnnnnnnnnnnnnnnnnnnnnnnnnnnnnnnnnnnnnnnnnnnnnnnnnnnnnnnnnnnnnnnnnnnnnnnnnnnnnnnnnnnnnnnnnnnnnnnnnnnnnnnnnnnnnnnnnnnnnnnnnnnnnnnnnnnnnnnnnnnnnnnnnnnnnnnnnnnnnnnnnnnnnnnnnnnnnnnnnnnnnnnnnnnnnnnnnnnnnnnnnnnnnnnnnnnnnnnnnnnnnnnnnnnnnnnnnnnnnnnnnnnnnnnnnnnnnnnnnnnnnnnnnnnnnnnnnnnnnnnnnnnnnnnnnnnnnnnnnnnnnnnnnnnnnnnnnnnnnnnnnnnnnnnnnnnnnnnnnnnnnnnnnnnnnnnnnnnnnnnnnnnnnnnnnnnnnnnnnnnnnnnnnnnnnnnnnnnnnnnnnnnnnnnnnnnnnnnnnnnnnnnnnnnnnnnnnnnnnnnnnnnnnnnnnnnnnnnnnnnnnnnnnnnnnnnnnnnnnnnnnnnnnnnnnnnnnnnnnnnnnnnnnnnnnnnnnnnnnnnnnnnnnnnnnnnnnnnnnnnnnnnnnnnnnnnnnnnnnnnnnnnnnnnnnnnnnnnnnnnnnnnnnnnnnnnnnnnnnnnnnnnnnnnnnnnnnnnnnnnnnnnnnnnnnnnnnnnnnnnnnnnnnnnnnnnnnnnnnnnnnnnnnnnnnnnnnnnnnnnnnnnnnnnnnnnnnnnnnnnnnnnnnnnnnnnnnnnnnnnnnnnnnnnnnnnnnnnnnnnnnnnnnnnnnnnnnnnnnnnnnnnnnnnnnnnnnnnnnnnnnnnnnnnnnnnnnnnnnnnnnnnnnnnnnnnnnnnnnnnnnnnnnnnnnnnnnnnnnnnnnnnnnnnnnnnnnnnnnnnnnnnnnnnnnnnnnnnnnnnnnnnnnnnnnnnnnnnnnnnnnnnnnnnnnnnnnnnnnnnnnnnnnnnnnnnnnnnnnnnnnnnnnnnnnnnnnnnnnnnnnnnnnnnnnnnnnnnnnnnnnnnnnnnnnnnnnnnnnnnnnnnnnnnnnnnnnnnnnnnnnnnnnnnnnnnnnnnnnnnnnnnnnnnnnnnnnnnnnnnnnnnnnnnnnnnnnnnnnnnnnnnnnnnnnnnnnnnnnnnnnnnnnnnnnnnnnnnnnnnnnnnnnnnnnnnnnnnnnnnnnnnnnnnnnnnnnnnnnnnnnnnnnnnnnnnnnnnnnnnnnnnnnnnnnnnnnnnnnnnnnnnnnnnnnnnnnnnnnnnnnnnnnnnnnnnnnnnnnnnnnnnnnnnnnnnnnnnnnnnnnnnnnnnnnnnnnnnnnnnnnnnnnnnnnnnnnnnnnnnnnnnnnnnnnnnnnnnnnnnnnnnnnnnnnnnnnnnnnnnnnnnnnnnnnnnnnnnnnnnnnnnnnnnnnnnnnnnnnnnnnnnnnnnnnnnnnnnnnnnnnnnnnnnnnnnnnnnnnnnnnnnnnnnnnnnnnnnnnnnnnnnnnnnnnnnnnnnnnnnnnnnnnnnnnnnnnnnnnnnnnnnnnnnnnnnnnnnnnnnnnnnnnnnnnnnnnnnnnnnnnnnnnnnnnnnnnnnnnnnnnnnnnnnnnnnnnnnnnnnnnnnnnnnnnnnnnnnnnnnnnnnnnnnnnnnnnnnnnnnnnnnnnnnnnnnnnnnnnnnnnnnnnnnnnnnnnnnnnnnnnnnnnnnnnnnnnnnnnnnnnnnnnnnnnnnnnnnnnnnnnnnnnnnnnnnnnnnnnnnnnnnnnnnnnnnnnnnnnnnnnnnnnnnnnnnnnnnnnnnnnnnnnnnnnnnnnnnnnnnnnnnnnnnnnnnnnnnnnnnnnnnnnnnnnnnnnnnnnnnnnnnnnnnnnnnnnnnnnnnnnnnnnnnnnnnnnnnnnnnnnnnnnnnnnnnnnnnnnnnnnnnnnnnnnnnnnnnnnnnnnnnnnnnnnnnnnnnnnnnnnnnnnnnnnnnnnnnnnnnnnnnnnnnnnnnnnnnnnnnnnnnnnnnnnnnnnnnnnnnnnnnnnnnnnnnnnnnnnnnnnnnnnnnnnnnnnnnnnnnnnnnnnnnnnnnnnnnnnnnnnnnnnnnnnnnnnnnnnnnnnnnnnnnnnnnnnnnnnnnnnnnnnnnnnnnnnnnnnnnnnnnnnnnnnnnnnnnnnnnnnnnnnnnnnnnnnnnnnnnnnnnnnnnnnnnnnnnnnnnnnnnnnnnnnnnnnnnnnnnnnnnnnnnnnnnnnnnnnnnnnnnnnnnnnnnnnnnnnnnnnnnnnnnnnnnnnnnnnnnnnnnnnnnnnnnnnnnnnnnnnnnnnnnnnnnnnnnnnnnnnnnnnnnnnnnnnnnnnnnnnnnnnnnnnnnnnnnnnnnnnnnnnnnnnnnnnnnnnnnnnnnnnnnnnnnnnnnnnnnnnnnnnnnnnnnnnnnnnnnnnnnnnnnnnnnnnnnnnnnnnnnnnnnnnnnnnnnnnnnnnnnnnnnnnnnnnnnnnnnnnnnnnnnnnnnnnnnnnnnnnnnnnnnnnnnnnnnnnnnnnnnnnnnnnnnnnnnnnnnnnnnnnnnnnnnnnnnnnnnnnnnnnnnnnnnnnnnnnnnnnnnnnnnnnnnnnnnnnnnnnnnnnnnnnnnnnnnnnnnnnnnnnnnnnnnnnnnnnnnnnnnnnnnnnnnnnnnnnnnnnnnnnnnnnnnnnnnnnnnnnnnnnnnnnnnnnnnnnnnnnnnnnnnnnnnnnnnnnnnnnnnnnnnnnnnnnnnnnnnnnnnnnnnnnnnnnnnnnnnnnnnnnnnnnnnnnnnnnnnnnnnnnnnnnnnnnnnnnnnnnnnnnnnnnnnnnnnnnnnnnnnnnnnnnnnnnnnnnnnnnnnnnnnnnnnnnnnnnnnnnnnnnnnnnnnnnnnnnnnnnnnnnnnnnnnnnnnnnnnnnnnnnnnnnnnnnnnnnnnnnnnnnnnnnnnnnnnnnnnnnnnnnnnnnnnnnnnnnnnnnnnnnnnnnnnnnnnnnnnnnnnnnnnnnnnnnnnnnnnnnnnnnnnnnnnnnnnnnnnnnnnnnnnnnnnnnnnnnnnnnnnnnnnnnnnnnnnnnnnnnnnnnnnnnnnnnnnnnnnnnnnnnnnnnnnnnnnnnnnnnnnnnnnnnnnnnnnnnnnnnnnnnnnnnnnnnnnnnnnnnnnnnnnnnnnnnnnnnnnnnnnnnnnnnnnnnnnnnnnnnnnnnnnnnnnnnnnnnnnnnnnnnnnnnnnnnnnnnnnnnnnnnnnnnnnnnnnnnnnnnnnnnnnnnnnnnnnnnnnnnnnnnnnnnnnnnnnnnnnnnnnnnnnnnnnnnnnnnnnnnnnnnnnnnnnnnnnnnnnnnnnnnnnnnnnnnnnnnnnnnnnnnnnnnnnnnnnnnnnnnnnnnnnnnnnnnnnnnnnnnnnnnnnnnnnnnnnnnnnnnnnnnnnnnnnnnnnnnnnnnnnnnnnnnnnnnnnnnnnnnnnnnnnnnnnnnnnnnnnnnnnnnnnnnnnnnnnnnnnnnnnnnnnnnnnnnnnnnnnnnnnnnnnnnnnnnnnnnnnnnnnnnnnnnnnnnnnnnnnnnnnnnnnnnnnnnnnnnnnnnnnnnnnnnnnnnnnnnnnnnnnnnnnnnnnnnnnnnnnnnnnnnnnnnnnnnnnnnnnnnnnnnnnnnnnnnnnnnnnnnnnnnnnnnnnnnnnnnnnnnnnnnnnnnnnnnnnnnnnnnnnnnnnnnnnnnnnnnnnnnnnnnnnnnnnnnnnnnnnnnnnnnnnnnnnnnnnnnnnnnnnnnnnnnnnnnnnnnnnnnnnnnnnnnnnnnnnnnnnnnnnnnnnnnnnnnnnnnnnnnnnnnnnnnnnnnnnnnnnnnnnnnnnnnnnnnnnnnnnnnnnnnnnnnnnnnnnnnnnnnnnnnnnnnnnnnnnnnnnnnnnnnnnnnnnnnnnnnnnnnnnnnnnnnnnnnnnnnnnnnnnnnnnnnnnnnnnnnnnnnnnnnnnnnnnnnnnnnnnnnnnnnnnnnnnnnnnnnnnnnnnnnnnnnnnnnnnnnnnnnnnnnnnnnnnnnnnnnnnnnnnnnnnnnnnnnnnnnnnnnnnnnnnnnnnnnnnnnnnnnnnnnnnnnnnnnnnnnnnnnnnnnnnnnnnnnnnnnnnnnnnnnnnnnnnnnnnnnnnnnnnnnnnnnnnnnnnnnnnnnnnnnnnnnnnnnnnnnnnnnnnnnnnnnnnnnnnnnnnnnnnnnnnnnnnnnnnnnnnnnnnnnnnnnnnnnnnnnnnnnnnnnnnnnnnnnnnnnnnnnnnnnnnnnnnnnnnnnnnnnnnnnnnnnnnnnnnnnnnnnnnnnnnnnnnnnnnnnnnnnnnnnnnnnnnnnnnnnnnnnnnnnnnnnnnnnnnnnnnnnnnnnnnnnnnnnnnnnnnnnnnnnnnnnnnnnnnnnnnnnnnnnnnnnnnnnnnnnnnnnnnnnnnnnnnnnnnnnnnnnnnnnnnnnnnnnnnnnnnnnnnnnnnnnnnnnnnnnnnnnnnnnnnnnnnnnnnnnnnnnnnnnnnnnnnnnnnnnnnnnnnnnnnnnnnnnnnnnnnnnnnnnnnnnnnnnnnnnnnnnnnnnnnnnnnnnnnnnnnnnnnnnnnnnnnnnnnnnnnnnnnnnnnnnnnnnnnnnnnnnnnnnnnnnnnnnnnnnnnnnnnnnnnnnnnnnnnnnnnnnnnnnnnnnnnnnnnnnnnnnnnnnnnnnnnnnnnnnnnnnnnnnnnnnnnnnnnnnnnnnnnnnnnnnnnnnnnnnnnnnnnnnnnnnnnnnnnnnnnnnnnnnnnnnnnnnnnnnnnnnnnnnnnnnnnnnnnnnnnnnnnnnnnnnnnnnnnnnnnnnnnnnnnnnnnnnnnnnnnnnnnnnnnnnnnnnnnnnnnnnnnnnnnnnnnnnnnnnnnnnnnnnnnnnnnnnnnnnnnnnnnnnnnnnnnnnnnnnnnnnnnnnnnnnnnnnnnnnnnnnnnnnnnnnnnnnnnnnnnnnnnnnnnnnnnnnnnnnnnnnnnnnnnnnnnnnnnnnnnnnnnnnnnnnnnnnnnnnnnnnnnnnnnnnnnnnnnnnnnnnnnnnnnnnnnnnnnnnnnnnnnnnnnnnnnnnnnnnnnnnnnnnnnnnnnnnnnnnnnnnnnnnnnnnnnnnnnnnnnnnnnnnnnnnnnnnnnnnnnnnnnnnnnnnnnnnnnnnnnnnnnnnnnnnnnnnnnnnnnnnnnnnnnnnnnnnnnnnnnnnnnnnnnnnnnnnnnnnnnnnnnnnnnnnnnnnnnnnnnnnnnnnnnnnnnnnnnnnnnnnnnnnnnnnnnnnnnnnnnnnnnnnnnnnnnnnnnnnnnnnnnnnnnnnnnnnnnnnnnnnnnnnnnnnnnnnnnnnnnnnnnnnnnnnnnnnnnnnnnnnnnnnnnnnnnnnnnnnnnnnnnnnnnnnnnnnnnnnnnnnnnnnnnnnnnnnnnnnnnnnnnnnnnnnnnnnnnnnnnnnnnnnnnnnnnnnnnnnnnnnnnnnnnnnnnnnnnnnnnnnnnnnnnnnnnnnnnnnnnnnnnnnnnnnnnnnnnnnnnnnnnnnnnnnnnnnnnnnnnnnnnnnnnnnnnnnnnnnnnnnnnnnnnnnnnnnnnnnnnnnnnnnnnnnnnnnnnnnnnnnnnnnnnnnnnnnnnnnnnnnnnnnnnnnnnnnnnnnnnnnnnnnnnnnnnnnnnnnnnnnnnnnnnnnnnnnnnnnnnnnnnnnnnnnnnnnnnnnnnnnnnnnnnnnnnnnnnnnnnnnnnnnnnnnnnnnnnnnnnnnnnnnnnnnnnnnnnnnnnnnnnnnnnnnnnnnnnnnnnnnnnnnnnnnnnnnnnnnnnnnnnnnnnnnnnnnnnnnnnnnnnnnnnnnnnnnnnnnnnnnnnnnnnnnnnnnnnnnnnnnnnnnnnnnnnnnnnnnnnnnnnnnnnnnnnnnnnnnnnnnnnnnnnnnnnnnnnnnnnnnnnnnnnnnnnnnnnnnnnnnnnnnnnnnnnnnnnnnnnnnnnnnnnnnnnnnnnnnnnnnnnnnnnnnnnnnnnnnnnnnnnnnnnnnnnnnnnnnnnnnnnnnnnnnnnnnnnnnnnnnnnnnnnnnnnnnnnnnnnnnnnnnnnnnnnnnnnnnnnnnnnnnnnnnnnnnnnnnnnnnnnnnnnnnnnnnnnnnnnnnnnnnnnnnnnnnnnnnnnnnnnnnnnnnnnnnnnnnnnnnnnnnnnnnnnnnnnnnnnnnnnnnnnnnnnnnnnnnnnnnnnnnnnnnnnnnnnnnnnnnnnnnnnnnnnnnnnnnnnnnnnnnnnnnnnnnnnnnnnnnnnnnnnnnnnnnnnnnnnnnnnnnnnnnnnnnnnnnnnnnnnnnnnnnnnnnnnnnnnnnnnnnnnnnnnnnnnnnnnnnnnnnnnnnnnnnnnnnnnnnnnnnnnnnnnnnnnnnnnnnnnnnnnnnnnnnnnnnnnnnnnnnnnnnnnnnnnnnnnnnnnnnnnnnnnnnnnnnnnnnnnnnnnnnnnnnnnnnnnnnnnnnnnnnnnnnnnnnnnnnnnnnnnnnnnnnnnnnnnnnnnnnnnnnnnnnnnnnnnnnnnnnnnnnnnnnnnnnnnnnnnnnnnnnnnnnnnnnnnnnnnnnnnnnnnnnnnnnnnnnnnnnnnnnnnnnnnnnnnnnnnnnnnnnnnnnnnnnnnnnnnnnnnnnnnnnnnnnnnnnnnnnnnnnnnnnnnnnnnnnnnnnnnnnnnnnnnnnnnnnnnnnnnnnnnnnnnnnnnnnnnnnnnnnnnnnnnnnnnnnnnnnnnnnnnnnnnnnnnnnnnnnnnnnnnnnnnnnnnnnnnnnnnnnnnnnnnnnnnnnnnnnnnnnnnnnnnnnnnnnnnnnnnnnnnnnnnnnnnnnnnnnnnnnnnnnnnnnnnnnnnnnnnnnnnnnnnnnnnnnnnnnnnnnnnnnnnnnnnnnnnnnnnnnnnnnnnnnnnnnnnnnnnnnnnnnnnnnnnnnnnnnnnnnnnnnnnnnnnnnnnnnnnnnnnnnnnnnnnnnnnnnnnnnnnnnnnnnnnnnnnnnnnnnnnnnnnnnnnnnnnnnnnnnnnnnnnnnnnnnnnnnnnnnnnnnnnnnnnnnnnnnnnnnnnnnnnnnnnnnnnnnnnnnnnnnnnnnnnnnnnnnnnnnnnnnnnnnnnnnnnnnnnnnnnnnnnnnnnnnnnnnnnnnnnnnnnnnnnnnnnnnnnnnnnnnnnnnnnnnnnnnnnnnnnnnnnnnnnnnnnnnnnnnnnnnnnnnnnnnnnnnnnnnnnnnnnnnnnnnnnnnnnnnnnnnnnnnnnnnnnnnnnnnnnnnnnnnnnnnnnnnnnnnnnnnnnnnnnnnnnnnnnnnnnnnnnnnnnnnnnnnnnnnnnnnnnnnnnnnnnnnnnnnnnnnnnnnnnnnnnnnnnnnnnnnnnnnnnnnnnnnnnnnnnnnnnnnnnnnnnnnnnnnnnnnnnnnnnnnnnnnnnnnnnnnnnnnnnnnnnnnnnnnnnnnnnnnnnnnnnnnnnnnnnnnnnnnnnnnnnnnnnnnnnnnnnnnnnnnnnnnnnnnnnnnnnnnnnnnnnnnnnnnnnnnnnnnnnnnnnnnnnnnnnnnnnnnnnnnnnnnnnnnnnnnnnnnnnnnnnnnnnnnnnnnnnnnnnnnnnnnnnnnnnnnnnnnnnnnnnnnnnnnnnnnnnnnnnnnnnnnnnnnnnnnnnnnnnnnnnnnnnnnnnnnnnnnnnnnnnnnnnnnnnnnnnnnnnnnnnnnnnnnnnnnnnnnnnnnnnnnnnnnnnnnnnnnnnnnnnnnnnnnnnnnnnnnnnnnnnnnnnnnnnnnnnnnnnnnnnnnnnnnnnnnnnnnnnnnnnnnnnnnnnnnnnnnnnnnnnnnnnnnnnnnnnnnnnnnnnnnnnnnnnnnnnnnnnnnnnnnnnnnnnnnnnnnnnnnnnnnnnnnnnnnnnnnnnnnnnnnnnnnnnnnnnnnnnnnnnnnnnnnnnnnnnnnnnnnnnnnnnnnnnnnnnnnnnnnnnnnnnnnnnnnnnnnnnnnnnnnnnnnnnnnnnnnnnnnnnnnnnnnnnnnnnnnnnnnnnnnnnnnnnnnnnnnnnnnnnnnnnnnnnnnnnnnnnnnnnnnnnnnnnnnnnnnnnnnnnnnnnnnnnnnnnnnnnnnnnnnnnnnnnnnnnnnnnnnnnnnnnnnnnnnnnnnnnnnnnnnnnnnnnnnnnnnnnnnnnnnnnnnnnnnnnnnnnnnnnnnnnnnnnnnnnnnnnnnnnnnnnnnnnnnnnnnnnnnnnnnnnnnnnnnnnnnnnnnnnnnnnnnnnnnnnnnnnnnnnnnnnnnnnnnnnnnnnnnnnnnnnnnnnnnnnnnnnnnnnnnnnnnnnnnnnnnnnnnnnnnnnnnnnnnnnnnnnnnnnnnnnnnnnnnnnnnnnnnnnnnnnnnnnnnnnnnnnnnnnnnnnnnnnnnnnnnnnnnnnnnnnnnnnnnnnnnnnnnnnnnnnnnnnnnnnnnnnnnnnnnnnnnnnnnnnnnnnnnnnnnnnnnnnnnnnnnnnnnnnnnnnnnnnnnnnnnnnnnnnnnnnnnnnnnnnnnnnnnnnnnnnnnnnnnnnnnnnnnnnnnnnnnnnnnnnnnnnnnnnnnnnnnnnnnnnnnnnnnnnnnnnnnnnnnnnnnnnnnnnnnnnnnnnnnnnnnnnnnnnnnnnnnnnnnnnnnnnnnnnnnnnnnnnnnnnnnnnnnnnnnnnnnnnnnnnnnnnnnnnnnnnnnnnnnnnnnnnnnnnnnnnnnnnnnnnnnnnnnnnnnnnnnnnnnnnnnnnnnnnnnnnnnnnnnnnnnnnnnnnnnnnnnnnnnnnnnnnnnnnnnnnnnnnnnnnnnnnnnnnnnnnnnnnnnnnnnnnnnnnnnnnnnnnnnnnnnnnnnnnnnnnnnnnnnnnnnnnnnnnnnnnnnnnnnnnnnnnnnnnnnnnnnnnnnnnnnnnnnnnnnnnnnnnnnnnnnnnnnnnnnnnnnnnnnnnnnnnnnnnnnnnnnnnnnnnnnnnnnnnnnnnnnnnnnnnnnnnnnnnnnnnnnnnnnnnnnnnnnnnnnnnnnnnnnnnnnnnnnnnnnnnnnnnnnnnnnnnnnnnnnnnnnnnnnnnnnnnnnnnnnnnnnnnnnnnnnnnnnnnnnnnnnnnnnnnnnnnnnnnnnnnnnnnnnnnnnnnnnnnnnnnnnnnnnnnnnnnnnnnnnnnnnnnnnnnnnnnnnnnnnnnnnnnnnnnnnnnnnnnnnnnnnnnnnnnnnnnnnnnnnnnnnnnnnnnnnnnnnnnnnnnnnnnnnnnnnnnnnnnnnnnnnnnnnnnnnnnnnnnnnnnnnnnnnnnnnnnnnnnnnnnnnnnnnnnnnnnnnnnnnnnnnnnnnnnnnnnnnnnnnnnnnnnnnnnnnnnnnnnnnnnnnnnnnnnnnnnnnnnnnnnnnnnnnnnnnnnnnnnnnnnnnnnnnnnnnnnnnnnnnnnnnnnnnnnnnnnnnnnnnnnnnnnnnnnnnnnnnnnnnnnnnnnnnnnnnnnnnnnnnnnnnnnnnnnnnnnnnnnnnnnnnnnnnnnnnnnnnnnnnnnnnnnnnnnnnnnnnnnnnnnnnnnnnnnnnnnnnnnnnnnnnnnnnnnnnnnnnnnnnnnnnnnnnnnnnnnnnnnnnnnnnnnnnnnnnnnnnnnnnnnnnnnnnnnnnnnnnnnnnnnnnnnnnnnnnnnnnnnnnnnnnnnnnnnnnnnnnnnnnnnnnnnnnnnnnnnnnnnnnnnnnnnnnnnnnnnnnnnnnnnnnnnnnnnnnnnnnnnnnnnnnnnnnnnnnnnnnnnnnnnnnnnnnnnnnnnnnnnnnnnnnnnnnnnnnnnnnnnnnnnnnnnnnnnnnnnnnnnnnnnnnnnnnnnnnnnnnnnnnnnnnnnnnnnnnnnnnnnnnnnnnnnnnnnnnnnnnnnnnnnnnnnnnnnnnnnnnnnnnnnnnnnnnnnnnnnnnnnnnnnnnnnnnnnnnnnnnnnnnnnnnnnnnnnnnnnnnnnnnnnnnnnnnnnnnnnnnnnnnnnnnnnnnnnnnnnnnnnnnnnnnnnnnnnnnnnnnnnnnnnnnnnnnnnnnnnnnnnnnnnnnnnnnnnnnnnnnnnnnnnnnnnnnnnnnnnnnnnnnnnnnnnnnnnnnnnnnnnnnnnnnnnnnnnnnnnnnnnnnnnnnnnnnnnnnnnnnnnnnnnnnnnnnnnnnnnnnnnnnnnnnnnnnnnnnnnnnnnnnnnnnnnnnnnnnnnnnnnnnnnnnnnnnnnnnnnnnnnnnnnnnnnnnnnnnnnnnnnnnnnnnnnnnnnnnnnnnnnnnnnnnnnnnnnnnnnnnnnnnnnnnnnnnnnnnnnnnnnnnnnnnnnnnnnnnnnnnnnnnnnnnnnnnnnnnnnnnnnnnnnnnnnnnnnnnnnnnnnnnnnnnnnnnnnnnnnnnnnnnnnnnnnnnnnnnnnnnnnnnnnnnnnnnnnnnnnnnnnnnnnnnnnnnnnnnnnnnnnnnnnnnnnnnnnnnnnnnnnnnnnnnnnnnnnnnnnnnnnnnnnnnnnnnnnnnnnnnnnnnnnnnnnnnnnnnnnnnnnnnnnnnnnnnnnnnnnnnnnnnnnnnnnnnnnnnnnnnnnnnnnnnnnnnnnnnnnnnnnnnnnnnnnnnnnnnnnnnnnnnnnnnnnnnnnnnnnnnnnnnnnnnnnnnnnnnnnnnnnnnnnnnnnnnnnnnnnnnnnnnnnnnnnnnnnnnnnnnnnnnnnnnnnnnnnnnnnnnnnnnnnnnnnnnnnnnnnnnnnnnnnnnnnnnnnnnnnnnnnnnnnnnnnnnnnnnnnnnnnnnnnnnnnnnnnnnnnnnnnnnnnnnnnnnnnnnnnnnnnnnnnnnnnnnnnnnnnnnnnnnnnnnnnnnnnnnnnnnnnnnnnnnnnnnnnnnnnnnnnnnnnnnnnnnnnnnnnnnnnnnnnnnnnnnnnnnnnnnnnnnnnnnnnnnnnnnnnnnnnnnnnnnnnnnnnnnnnnnnnnnnnnnnnnnnnnnnnnnnnnnnnnnnnnnnnnnnnnnnnnnnnnnnnnnnnnnnnnnnnnnnnnnnnnnnnnnnnnnnnnnnnnnnnnnnnnnnnnnnnnnnnnnnnnnnnnnnnnnnnnnnnnnnnnnnnnnnnnnnnnnnnnnnnnnnnnnnnnnnnnnnnnnnnnnnnnnnnnnnnnnnnnnnnnnnnnnnnnnnnnnnnnnnnnnnnnnnnnnnnnnnnnnnnnnnnnnnnnnnnnnnnnnnnnnnnnnnnnnnnnnnnnnnnnnnnnnnnnnnnnnnnnnnnnnnnnnnnnnnnnnnnnnnnnnnnnnnnnnnnnnnnnnnnnnnnnnnnnnnnnnnnnnnnnnnnnnnnnnnnnnnnnnnnnnnnnnnnnnnnnnnnnnnnnnnnnnnnnnnnnnnnnnnnnnnnnnnnnnnnnnnnnnnnnnnnnnnnnnnnnnnnnnnnnnnnnnnnnnnnnnnnnnnnnnnnnnnnnnnnnnnnnnnnnnnnnnnnnnnnnnnnnnnnnnnnnnnnnnnnnnnnnnnnnnnnnnnnnnnnnnnnnnnnnnnnnnnnnnnnnnnnnnnnnnnnnnnnnnnnnnnnnnnnnnnnnnnnnnnnnnnnnnnnnnnnnnnnnnnnnnnnnnnnnnnnnnnnnnnnnnnnnnnnnnnnnnnnnnnnnnnnnnnnnnnnnnnnnnnnnnnnnnnnnnnnnnnnnnnnnnnnnnnnnnnnnnnnnnnnnnnnnnnnnnnnnnnnnnnnnnnnnnnnnnnnnnnnnnnnnnnnnnnnnnnnnnnnnnnnnnnnnnnnnnnnnnnnnnnnnnnnnnnnnnnnnnnnnnnnnnnnnnnnnnnnnnnnnnnnnnnnnnnnnnnnnnnnnnnnnnnnnnnnnnnnnnnnnnnnnnnnnnnnnnnnnnnnnnnnnnnnnnnnnnnnnnnnnnnnnnnnnnnnnnnnnnnnnnnnnnnnnnnnnnnnnnnnnnnnnnnnnnnnnnnnnnnnnnnnnnnnnnnnnnnnnnnnnnnnnnnnnnnnnnnnnnnnnnnnnnnnnnnnnnnnnnnnnnnnnnnnnnnnnnnnnnnnnnnnnnnnnnnnnnnnnnnnnnnnnnnnnnnnnnnnnnnnnnnnnnnnnnnnnnnnnnnnnnnnnnnnnnnnnnnnnnnnnnnnnnnnnnnnnnnnnnnnnnnnnnnnnnnnnnnnnnnnnnnnnnnnnnnnnnnnnnnnnnnnnnnnnnnnnnnnnnnnnnnnnnnnnnnnnnnnnnnnnnnnnnnnnnnnnnnnnnnnnnnnnnnnnnnnnnnnnnnnnnnnnnnnnnnnnnnnnnnnnnnnnnnnnnnnnnnnnnnnnnnnnnnnnnnnnnnnnnnnnnnnnnnnnnnnnnnnnnnnnnnnnnnnnnnnnnnnnnnnnnnnnnnnnnnnnnnnnnnnnnnnnnnnnnnnnnnnnnnnnnnnnnnnnnnnnnnnnnnnnnnnnnnnnnnnnnnnnnnnnnnnnnnnnnnnnnnnnnnnnnnnnnnnnnnnnnnnnnnnnnnnnnnnnnnnnnnnnnnnnnnnnnnnnnnnnnnnnnnnnnnnnnnnnnnnnnnnnnnnnnnnnnnnnnnnnnnnnnnnnnnnnnnnnnnnnnnnnnnnnnnnnnnnnnnnnnnnnnnnnnnnnnnnnnnnnnnnnnnnnnnnnnnnnnnnnnnnnnnnnnnnnnnnnnnnnnnnnnnnnnnnnnnnnnnnnnnnnnnnnnnnnnnnnnnnnnnnnnnnnnnnnnnnnnnnnnnnnnnnnnnnnnnnnnnnnnnnnnnnnnnnnnnnnnnnnnnnnnnnnnnnnnnnnnnnnnnnnnnnnnnnnnnnnnnnnnnnnnnnnnnnnnnnnnnnnnnnnnnnnnnnnnnnnnnnnnnnnnnnnnnnnnnnnnnnnnnnnnnnnnnnnnnnnnnnnnnnnnnnnnnnnnnnnnnnnnnnnnnnnnnnnnnnnnnnnnnnnnnnnnnnnnnnnnnnnnnnnnnnnnnnnnnnnnnnnnnnnnnnnnnnnnnnnnnnnnnnnnnnnnnnnnnnnnnnnnnnnnnnnnnnnnnnnnnnnnnnnnnnnnnnnnnnnnnnnnnnnnnnnnnnnnnnnnnnnnnnnnnnnnnnnnnnnnnnnnnnnnnnnnnnnnnnnnnnnnnnnnnnnnnnnnnnnnnnnnnnnnnnnnnnnnnnnnnnnnnnnnnnnnnnnnnnnnnnnnnnnnnnnnnnnnnnnnnnnnnnnnnnnnnnnnnnnnnnnnnnnnnnnnnnnnnnnnnnnnnnnnnnnnnnnnnnnnnnnnnnnnnnnnnnnnnnnnnnnnnnnnnnnnnnnnnnnnnnnnnnnnnnnnnnnnnnnnnnnnnnnnnnnnnnnnnnnnnnnnnnnnnnnnnnnnnnnnnnnnnnnnnnnnnnnnnnnnnnnnnnnnnnnnnnnnnnnnnnnnnnnnnnnnnnnnnnnnnnnnnnnnnnnnnnnnnnnnnnnnnnnnnnnnnnnnnnnnnnnnnnnnnnnnnnnnnnnnnnnnnnnnnnnnnnnnnnnnnnnnnnnnnnnnnnnnnnnnnnnnnnnnnnnnnnnnnnnnnnnnnnnnnnnnnnnnnnnnnnnnnnnnnnnnnnnnnnnnnnnnnnnnnnnnnnnnnnnnnnnnnnnnnnnnnnnnnnnnnnnnnnnnnnnnnnnnnnnnnnnnnnnnnnnnnnnnnnnnnnnnnnnnnnnnnnnnnnnnnnnnnnnnnnnnnnnnnnnnnnnnnnnnnnnnnnnnnnnnnnnnnnnnnnnnnnnnnnnnnnnnnnnnnnnnnnnnnnnnnnnnnnnnnnnnnnnnnnnnnnnnnnnnnnnnnnnnnnnnnnnnnnnnnnnnnnnnnnnnnnnnnnnnnnnnnnnnnnnnnnnnnnnnnnnnnnnnnnnnnnnnnnnnnnnnnnnnnnnnnnnnnnnnnnnnnnnnnnnnnnnnnnnnnnnnnnnnnnnnnnnnnnnnnnnnnnnnnnnnnnnnnnnnnnnnnnnnnnnnnnnnnnnnnnnnnnnnnnnnnnnnnnnnnnnnnnnnnnnnnnnnnnnnnnnnnnnnnnnnnnnnnnnnnnnnnnnnnnnnnnnnnnnnnnnnnnnnnnnnnnnnnnnnnnnnnnnnnnnnnnnnnnnnnnnnnnnnnnnnnnnnnnnnnnnnnnnnnnnnnnnnnnnnnnnnnnnnnnnnnnnnnnnnnnnnnnnnnnnnnnnnnnnnnnnnnnnnnnnnnnnnnnnnnnnnnnnnnnnnnnnnnnnnnnnnnnnnnnnnnnnnnnnnnnnnnnnnnnnnnnnnnnnnnnnnnnnnnnnnnnnnnnnnnnnnnnnnnnnnnnnnnnnnnnnnnnnnnnnnnnnnnnnnnnnnnnnnnnnnnnnnnnnnnnnnnnnnnnnnnnnnnnnnnnnnnnnnnnnnnnnnnnnnnnnnnnnnnnnnnnnnnnnnnnnnnnnnnnnnnnnnnnnnnnnnnnnnnnnnnnnnnnnnnnnnnnnnnnnnnnnnnnnnnnnnnnnnnnnnnnnnnnnnnnnnnnnnnnnnnnnnnnnnnnnnnnnnnnnnnnnnnnnnnnnnnnnnnnnnnnnnnnnnnnnnnnnnnnnnnnnnnnnnnnnnnnnnnnnnnnnnnnnnnnnnnnnnnnnnnnnnnnnnnnnnnnnnnnnnnnnnnnnnnnnnnnnnnnnnnnnnnnnnnnnnnnnnnnnnnnnnnnnnnnnnnnnnnnnnnnnnnnnnnnnnnnnnnnnnnnnnnnnnnnnnnnnnnnnnnnnnnnnnnnnnnnnnnnnnnnnnnnnnnnnnnnnnnnnnnnnnnnnnnnnnnnnnnnnnnnnnnnnnnnnnnnnnnnnnnnnnnnnnnnnnnnnnnnnnnnnnnnnnnnnnnnnnnnnnnnnnnnnnnnnnnnnnnnnnnnnnnnnnnnnnnnnnnnnnnnnnnnnnnnnnnnnnnnnnnnnnnnnnnnnnnnnnnnnnnnnnnnnnnnnnnnnnnnnnnnnnnnnnnnnnnnnnnnnnnnnnnnnnnnnnnnnnnnnnnnnnnnnnnnnnnnnnnnnnnnnnnnnnnnnnnnnnnnnnnnnnnnnnnnnnnnnnnnnnnnnnnnnnnnnnnnnnnnnnnnnnnnnnnnnnnnnnnnnnnnnnnnnnnnnnnnnnnnnnnnnnnnnnnnnnnnnnnnnnnnnnnnnnnnnnnnnnnnnnnnnnnnnnnnnnnnnnnnnnnnnnnnnnnnnnnnnnnnnnnnnnnnnnnnnnnnnnnnnnnnnnnnnnnnnnnnnnnnnnnnnnnnnnnnnnnnnnnnnnnnnnnnnnnnnnnnnnnnnnnnnnnnnnnnnnnnnnnnnnnnnnnnnnnnnnnnnnnnnnnnnnnnnnnnnnnnnnnnnnnnnnnnnnnnnnnnnnnnnnnnnnnnnnnnnnnnnnnnnnnnnnnnnnnnnnnnnnnnnnnnnnnnnnnnnnnnnnnnnnnnnnnnnnnnnnnnnnnnnnnnnnnnnnnnnnnnnnnnnnnnnnnnnnnnnnnnnnnnnnnnnnnnnnnnnnnnnnnnnnnnnnnnnnnnnnnnnnnnnnnnnnnnnnnnnnnnnnnnnnnnnnnnnnnnnnnnnnnnnnnnnnnnnnnnnnnnnnnnnnnnnnnnnnnnnnnnnnnnnnnnnnnnnnnnnnnnnnnnnnnnnnnnnnnnnnnnnnnnnnnnnnnnnnnnnnnnnnnnnnnnnnnnnnnnnnnnnnnnnnnnnnnnnnnnnnnnnnnnnnnnnnnnnnnnnnnnnnnnnnnnnnnnnnnnnnnnnnnnnnnnnnnnnnnnnnnnnnnnnnnnnnnnnnnnnnnnnnnnnnnnnnnnnnnnnnnnnnnnnnnnnnnnnnnnnnnnnnnnnnnnnnnnnnnnnnnnnnnnnnnnnnnnnnnnnnnnnnnnnnnnnnnnnnnnnnnnnnnnnnnnnnnnnnnnnnnnnnnnnnnnnnnnnnnnnnnnnnnnnnnnnnnnnnnnnnnnnnnnnnnnnnnnnnnnnnnnnnnnnnnnnnnnnnnnnnnnnnnnnnnnnnnnnnnnnnnnnnnnnnnnnnnnnnnnnnnnnnnnnnnnnnnnnnnnnnnnnnnnnnnnnnnnnnnnnnnnnnnnnnnnnnnnnnnnnnnnnnnnnnnnnnnnnnnnnnnnnnnnnnnnnnnnnnnnnnnnnnnnnnnnnnnnnnnnnnnnnnnnnnnnnnnnnnnnnnnnnnnnnnnnnnnnnnnnnnnnnnnnnnnnnnnnnnnnnnnnnnnnnnnnnnnnnnnnnnnnnnnnnnnnnnnnnnnnnnnnnnnnnnnnnnnnnnnnnnnnnnnnnnnnnnnnnnnnnnnnnnnnnnnnnnnnnnnnnnnnnnnnnnnnnnnnnnnnnnnnnnnnnnnnnnnnnnnnnnnnnnnnnnnnnnnnnnnnnnnnnnnnnnnnnnnnnnnnnnnnnnnnnnnnnnnnnnnnnnnnnnnnnnnnnnnnnnnnnnnnnnnnnnnnnnnnnnnnnnnnnnnnnnnnnnnnnnnnnnnnnnnnnnnnnnnnnnnnnnnnnnnnnnnnnnnnnnnnnnnnnnnnnnnnnnnnnnnnnnnnnnnnnnnnnnnnnnnnnnnnnnnnnnnnnnnnnnnnnnnnnnnnnnnnnnnnnnnnnnnnnnnnnnnnnnnnnnnnnnnnnnnnnnnnnnnnnnnnnnnnnnnnnnnnnnnnnnnnnnnnnnnnnnnnnnnnnnnnnnnnnnnnnnnnnnnnnnnnnnnnnnnnnnnnnnnnnnnnnnnnnnnnnnnnnnnnnnnnnnnnnnnnnnnnnnnnnnnnnnnnnnnnnnnnnnnnnnnnnnnnnnnnnnnnnnnnnnnnnnnnnnnnnnnnnnnnnnnnnnnnnnnnnnnnnnnnnnnnnnnnnnnnnnnnnnnnnnnnnnnnnnnnnnnnnnnnnnnnnnnnnnnnnnnnnnnnnnnnnnnnnnnnnnnnnnnnnnnnnnnnnnnnnnnnnnnnnnnnnnnnnnnnnnnnnnnnnnnnnnnnnnnnnnnnnnnnnnnnnnnnnnnnnnnnnnnnnnnnnnnnnnnnnnnnnnnnnnnnnnnnnnnnnnnnnnnnnnnnnnnnnnnnnnnnnnnnnnnnnnnnnnnnnnnnnnnnnnnnnnnnnnnnnnnnnnnnnnnnnnnnnnnnnnnnnnnnnnnnnnnnnnnnnnnnnnnnnnnnnnnnnnnnnnnnnnnnnnnnnnnnnnnnnnnnnnnnnnnnnnnnnnnnnnnnnnnnnnnnnnnnnnnnnnnnnnnnnnnnnnnnnnnnnnnnnnnnnnnnnnnnnnnnnnnnnnnnnnnnnnnnnnnnnnnnnnnnnnnnnnnnnnnnnnnnnnnnnnnnnnnnnnnnnnnnnnnnnnnnnnnnnnnnnnnnnnnnnnnnnnnnnnnnnnnnnnnnnnnnnnnnnnnnnnnnnnnnnnnnnnnnnnnnnnnnnnnnnnnnnnnnnnnnnnnnnnnnnnnnnnnnnnnnnnnnnnnnnnnnnnnnnnnnnnnnnnnnnnnnnnnnnnnnnnnnnnnnnnnnnnnnnnnnnnnnnnnnnnnnnnnnnnnnnnnnnnnnnnnnnnnnnnnnnnnnnnnnnnnnnnnnnnnnnnnnnnnnnnnnnnnnnnnnnnnnnnnnnnnnnnnnnnnnnnnnnnnnnnnnnnnnnnnnnnnnnnnnnnnnnnnnnnnnnnnnnnnnnnnnnnnnnnnnnnnnnnnnnnnnnnnnnnnnnnnnnnnnnnnnnnnnnnnnnnnnnnnnnnnnnnnnnnnnnnnnnnnnnnnnnnnnnnnnnnnnnnnnnnnnnnnnnnnnnnnnnnnnnnnnnnnnnnnnnnnnnnnnnnnnnnnnnnnnnnnnnnnnnnnnnnnnnnnnnnnnnnnnnnnnnnnnnnnnnnnnnnnnnnnnnnnnnnnnnnnnnnnnnnnnnnnnnnnnnnnnnnnnnnnnnnnnnnnnnnnnnnnnnnnnnnnnnnnnnnnnnnnnnnnnnnnnnnnnnnnnnnnnnnnnnnnnnnnnnnnnnnnnnnnnnnnnnnnnnnnnnnnnnnnnnnnnnnnnnnnnnnnnnnnnnnnnnnnnnnnnnnnnnnnnnnnnnnnnnnnnnnnnnnnnnnnnnnnnnnnnnnnnnnnnnnnnnnnnnnnnnnnnnnnnnnnnnnnnnnnnnnnnnnnnnnnnnnnnnnnnnnnnnnnnnnnnnnnnnnnnnnnnnnnnnnnnnnnnnnnnnnnnnnnnnnnnnnnnnnnnnnnnnnnnnnnnnnnnnnnnnnnnnnnnnnnnnnnnnnnnnnnnnnnnnnnnnnnnnnnnnnnnnnnnnnnnnnnnnnnnnnnnnnnnnnnnnnnnnnnnnnnnnnnnnnnnnnnnnnnnnnnnnnnnnnnnnnnnnnnnnnnnnnnnnnnnnnnnnnnnnnnnnnnnnnnnnnnnnnnnnnnnnnnnnnnnnnnnnnnnnnnnnnnnnnnnnnnnnnnnnnnnnnnnnnnnnnnnnnnnnnnnnnnnnnnnnnnnnnnnnnnnnnnnnnnnnnnnnnnnnnnnnnnnnnnnnnnnnnnnnnnnnnnnnnnnnnnnnnnnnnnnnnnnnnnnnnnnnnnnnnnnnnnnnnnnnnnnnnnnnnnnnnnnnnnnnnnnnnnnnnnnnnnnnnnnnnnnnnnnnnnnnnnnnnnnnnnnnnnnnnnnnnnnnnnnnnnnnnnnnnnnnnnnnnnnnnnnnnnnnnnnnnnnnnnnnnnnnnnnnnnnnnnnnnnnnnnnnnnnnnnnnnnnnnnnnnnnnnnnnnnnnnnnnnnnnnnnnnnnnnnnnnnnnnnnnnnnnnnnnnnnnnnnnnnnnnnnnnnnnnnnnnnnnnnnnnnnnnnnnnnnnnnnnnnnnnnnnnnnnnnnnnnnnnnnnnnnnnnnnnnnnnnnnnnnnnnnnnnnnnnnnnnnnnnnnnnnnnnnnnnnnnnnnnnnnnnnnnnnnnnnnnnnnnnnnnnnnnnnnnnnnnnnnnnnnnnnnnnnnnnnnnnnnnnnnnnnnnnnnnnnnnnnnnnnnnnnnnnnnnnnnnnnnnnnnnnnnnnnnnnnnnnnnnnnnnnnnnnnnnnnnnnnnnnnnnnnnnnnnnnnnnnnnnnnnnnnnnnnnnnnnnnnnnnnnnnnnnnnnnnnnnnnnnnnnnnnnnnnnnnnnnnnnnnnnnnnnnnnnnnnnnnnnnnnnnnnnnnnnnnnnnnnnnnnnnnnnnnnnnnnnnnnnnnnnnnnnnnnnnnnnnnnnnnnnnnnnnnnnnnnnnnnnnnnnnnnnnnnnnnnnnnnnnnnnnnnnnnnnnnnnnnnnnnnnnnnnnnnnnnnnnnnnnnnnnnnnnnnnnnnnnnnnnnnnnnnnnnnnnnnnnnnnnnnnnnnnnnnnnnnnnnnnnnnnnnnnnnnnnnnnnnnnnnnnnnnnnnnnnnnnnnnnnnnnnnnnnnnnnnnnnnnnnnnnnnnnnnnnnnnnnnnnnnnnnnnnnnnnnnnnnnnnnnnnnnnnnnnnnnnnnnnnnnnnnnnnnnnnnnnnnnnnnnnnnnnnnnnnnnnnnnnnnnnnnnnnnnnnnnnnnnnnnnnnnnnnnnnnnnnnnnnnnnnnnnnnnnnnnnnnnnnnnnnnnnnnnnnnnnnnnnnnnnnnnnnnnnnnnnnnnnnnnnnnnnnnnnnnnnnnnnnnnnnnnnnnnnnnnnnnnnnnnnnnnnnnnnnnnnnnnnnnnnnnnnnnnnnnnnnnnnnnnnnnnnnnnnnnnnnnnnnnnnnnnnnnnnnnnnnnnnnnnnnnnnnnnnnnnnnnnnnnnnnnnnnnnnnnnnnnnnnnnnnnnnnnnnnnnnnnnnnnnnnnnnnnnnnnnnnnnnnnnnnnnnnnnnnnnnnnnnnnnnnnnnnnnnnnnnnnnnnnnnnnnnnnnnnnnnnnnnnnnnnnnnnnnnnnnnnnnnnnnnnnnnnnnnnnnnnnnnnnnnnnnnnnnnnnnnnnnnnnnnnnnnnnnnnnnnnnnnnnnnnnnnnnnnnnnnnnnnnnnnnnnnnnnnnnnnnnnnnnnnnnnnnnnnnnnnnnnnnnnnnnnnnnnnnnnnnnnnnnnnnnnnnnnnnnnnnnnnnnnnnnnnnnnnnnnnnnnnnnnnnnnnnnnnnnnnnnnnnnnnnnnnnnnnnnnnnnnnnnnnnnnnnnnnnnnnnnnnnnnnnnnnnnnnnnnnnnnnnnnnnnnnnnnnnnnnnnnnnnnnnnnnnnnnnnnnnnnnnnnnnnnnnnnnnnnnnnnnnnnnnnnnnnnnnnnnnnnnnnnnnnnnnnnnnnnnnnnnnnnnnnnnnnnnnnnnnnnnnnnnnnnnnnnnnnnnnnnnnnnnnnnnnnnnnnnnnnnnnnnnnnnnnnnnnnnnnnnnnnnnnnnnnnnnnnnnnnnnnnnnnnnnnnnnnnnnnnnnnnnnnnnnnnnnnnnnnnnnnnnnnnnnnnnnnnnnnnnnnnnnnnnnnnnnnnnnnnnnnnnnnnnnnnnnnnnnnnnnnnnnnnnnnnnnnnnnnnnnnnnnnnnnnnnnnnnnnnnnnnnnnnnnnnnnnnnnnnnnnnnnnnnnnnnnnnnnnnnnnnnnnnnnnnnnnnnnnnnnnnnnnnnnnnnnnnnnnnnnnnnnnnnnnnnnnnnnnnnnnnnnnnnnnnnnnnnnnnnnnnnnnnnnnnnnnnnnnnnnnnnnnnnnnnnnnnnnnnnnnnnnnnnnnnnnnnnnnnnnnnnnnnnnnnnnnnnnnnnnnnnnnnnnnnnnnnnnnnnnnnnnnnnnnnnnnnnnnnnnnnnnnnnnnnnnnnnnnnnnnnnnnnnnnnnnnnnnnnnnnnnnnnnnnnnnnnnnnnnnnnnnnnnnnnnnnnnnnnnnnnnnnnnnnnnnnnnnnnnnnnnnnnnnnnnnnnnnnnnnnnnnnnnnnnnnnnnnnnnnnnnnnnnnnnnnnnnnnnnnnnnnnnnnnnnnnnnnnnnnnnnnnnnnnnnnnnnnnnnnnnnnnnnnnnnnnnnnnnnnnnnnnnnnnnnnnnnnnnnnnnnnnnnnnnnnnnnnnnnnnnnnnnnnnnnnnnnnnnnnnnnnnnnnnnnnnnnnnnnnnnnnnnnnnnnnnnnnnnnnnnnnnnnnnnnnnnnnnnnnnnnnnnnnnnnnnnnnnnnnnnnnnnnnnnnnnnnnnnnnnnnnnnnnnnnnnnnnnnnnnnnnnnnnnnnnnnnnnnnnnnnnnnnnnnnnnnnnnnnnnnnnnnnnnnnnnnnnnnnnnnnnnnnnnnnnnnnnnnnnnnnnnnnnnnnnnnnnnnnnnnnnnnnnnnnnnnnnnnnnnnnnnnnnnnnnnnnnnnnnnnnnnnnnnnnnnnnnnnnnnnnnnnnnnnnnnnnnnnnnnnnnnnnnnnnnnnnnnnnnnnnnnnnnnnnnnnnnnnnnnnnnnnnnnnnnnnnnnnnnnnnnnnnnnnnnnnnnnnnnnnnnnnnnnnnnnnnnnnnnnnnnnnnnnnnnnnnnnnnnnnnnnnnnnnnnnnnnnnnnnnnnnnnnnnnnnnnnnnnnnnnnnnnnnnnnnnnnnnnnnnnnnnnnnnnnnnnnnnnnnnnnnnnnnnnnnnnnnnnnnnnnnnnnnnnnnnnnnnnnnnnnnnnnnnnnnnnnnnnnnnnnnnnnnnnnnnnnnnnnnnnnnnnnnnnnnnnnnnnnnnnnnnnnnnnnnnnnnnnnnnnnnnnnnnnnnnnnnnnnnnnnnnnnnnnnnnnnnnnnnnnnnnnnnnnnnnnnnnnnnnnnnnnnnnnnnnnnnnnnnnnnnnnnnnnnnnnnnnnnnnnnnnnnnnnnnnnnnnnnnnnnnnnnnnnnnnnnnnnnnnnnnnnnnnnnnnnnnnnnnnnnnnnnnnnnnnnnnnnnnnnnnnnnnnnnnnnnnnnnnnnnnnnnnnnnnnnnnnnnnnnnnnnnnnnnnnnnnnnnnnnnnnnnnnnnnnnnnnnnnnnnnnnnnnnnnnnnnnnnnnnnnnnnnnnnnnnnnnnnnnnnnnnnnnnnnnnnnnnnnnnnnnnnnnnnnnnnnnnnnnnnnnnnnnnnnnnnnnnnnnnnnnnnnnnnnnnnnnnnnnnnnnnnnnnnnnnnnnnnnnnnnnnnnnnnnnnnnnnnnnnnnnnnnnnnnnnnnnnnnnnnnnnnnnnnnnnnnnnnnnnnnnnnnnnnnnnnnnnnnnnnnnnnnnnnnnnnnnnnnnnnnnnnnnnnnnnnnnnnnnnnnnnnnnnnnnnnnnnnnnnnnnnnnnnnnnnnnnnnnnnnnnnnnnnnnnnnnnnnnnnnnnnnnnnnnnnnnnnnnnnnnnnnnnnnnnnnnnnnnnnnnnnnnnnnnnnnnnnnnnnnnnnnnnnnnnnnnnnnnnnnnnnnnnnnnnnnnnnnnnnnnnnnnnnnnnnnnnnnnnnnnnnnnnnnnnnnnnnnnnnnnnnnnnnnnnnnnnnnnnnnnnnnnnnnnnnnnnnnnnnnnnnnnnnnnnnnnnnnnnnnnnnnnnnnnnnnnnnnnnnnnnnnnnnnnnnnnnnnnnnnnnnnnnnnnnnnnnnnnnnnnnnnnnnnnnnnnnnnnnnnnnnnnnnnnnnnnnnnnnnnnnnnnnnnnnnnnnnnnnnnnnnnnnnnnnnnnnnnnnnnnnnnnnnnnnnnnnnnnnnnnnnnnnnnnnnnnnnnnnnnnnnnnnnnnnnnnnnnnnnnnnnnnnnnnnnnnnnnnnnnnnnnnnnnnnnnnnnnnnnnnnnnnnnnnnnnnnnnnnnnnnnnnnnnnnnnnnnnnnnnnnnnnnnnnnnnnnnnnnnnnnnnnnnnnnnnnnnnnnnnnnnnnnnnnnnnnnnnnnnnnnnnnnnnnnnnnnnnnnnnnnnnnnnnnnnnnnnnnnnnnnnnnnnnnnnnnnnnnnnnnnnnnnnnnnnnnnnnnnnnnnnnnnnnnnnnnnnnnnnnnnnnnnnnnnnnnnnnnnnnnnnnnnnnnnnnnnnnnnnnnnnnnnnnnnnnnnnnnnnnnnnnnnnnnnnnnnnnnnnnnnnnnnnnnnnnnnnnnnnnnnnnnnnnnnnnnnnnnnnnnnnnnnnnnnnnnnnnnnnnnnnnnnnnnnnnnnnnnnnnnnnnnnnnnnnnnnnnnnnnnnnnnnnnnnnnnnnnnnnnnnnnnnnnnnnnnnnnnnnnnnnnnnnnnnnnnnnnnnnnnnnnnnnnnnnnnnnnnnnnnnnnnnnnnnnnnnnnnnnnnnnnnnnnnnnnnnnnnnnnnnnnnnnnnnnnnnnnnnnnnnnnnnnnnnnnnnnnnnnnnnnnnnnnnnnnnnnnnnnnnnnnnnnnnnnnnnnnnnnnnnnnnnnnnnnnnnnnnnnnnnnnnnnnnnnnnnnnnnnnnnnnnnnnnnnnnnnnnnnnnnnnnnnnnnnnnnnnnnnnnnnnnnnnnnnnnnnnnnnnnnnnnnnnnnnnnnnnnnnnnnnnnnnnnnnnnnnnnnnnnnnnnnnnnnnnnnnnnnnnnnnnnnnnnnnnnnnnnnnnnnnnnnnnnnnnnnnnnnnnnnnnnnnnnnnnnnnnnnnnnnnnnnnnnnnnnnnnnnnnnnnnnnnnnnnnnnnnnnnnnnnnnnnnnnnnnnnnnnnnnnnnnnnnnnnnnnnnnnnnnnnnnnnnnnnnnnnnnnnnnnnnnnnnnnnnnnnnnnnnnnnnnnnnnnnnnnnnnnnnnnnnnnnnnnnnnnnnnnnnnnnnnnnnnnnnnnnnnnnnnnnnnnnnnnnnnnnnnnnnnnnnnnnnnnnnnnnnnnnnnnnnnnnnnnnnnnnnnnnnnnnnnnnnnnnnnnnnnnnnnnnnnnnnnnnnnnnnnnnnnnnnnnnnnnnnnnnnnnnnnnnnnnnnnnnnnnnnnnnnnnnnnnnnnnnnnnnnnnnnnnnnnnnnnnnnnnnnnnnnnnnnnnnnnnnnnnnnnnnnnnnnnnnnnnnnnnnnnnnnnnnnnnnnnnnnnnnnnnnnnnnnnnnnnnnnnnnnnnnnnnnnnnnnnnnnnnnnnnnnnnnnnnnnnnnnnnnnnnnnnnnnnnnnnnnnnnnnnnnnnnnnnnnnnnnnnnnnnnnnnnnnnnnnnnnnnnnnnnnnnnnnnnnnnnnnnnnnnnnnnnnnnnnnnnnnnnnnnnnnnnnnnnnnnnnnnnnnnnnnnnnnnnnnnnnnnnnnnnnnnnnnnnnnnnnnnnnnnnnnnnnnnnnnnnnnnnnnnnnnnnnnnnnnnnnnnnnnnnnnnnnnnnnnnnnnnnnnnnnnnnnnnnnnnnnnnnnnnnnnnnnnnnnnnnnnnnnnnnnnnnnnnnnnnnnnnnnnnnnnnnnnnnnnnnnnnnnnnnnnnnnnnnnnnnnnnnnnnnnnnnnnnnnnnnnnnnnnnnnnnnnnnnnnnnnnnnnnnnnnnnnnnnnnnnnnnnnnnnnnnnnnnnnnnnnnnnnnnnnnnnnnnnnnnnnnnnnnnnnnnnnnnnnnnnnnnnnnnnnnnnnnnnnnnnnnnnnnnnnnnnnnnnnnnnnnnnnnnnnnnnnnnnnnnnnnnnnnnnnnnnnnnnnnnnnnnnnnnnnnnnnnnnnnnnnnnnnnnnnnnnnnnnnnnnnnnnnnnnnnnnnnnnnnnnnnnnnnnnnnnnnnnnnnnnnnnnnnnnnnnnnnnnnnnnnnnnnnnnnnnnnnnnnnnnnnnnnnnnnnnnnnnnnnnnnnnnnnnnnnnnnnnnnnnnnnnnnnnnnnnnnnnnnnnnnnnnnnnnnnnnnnnnnnnnnnnnnnnnnnnnnnnnnnnnnnnnnnnnnnnnnnnnnnnnnnnnnnnnnnnnnnnnnnnnnnnnnnnnnnnnnnnnnnnnnnnnnnnnnnnnnnnnnnnnnnnnnnnnnnnnnnnnnnnnnnnnnnnnnnnnnnnnnnnnnnnnnnnnnnnnnnnnnnnnnnnnnnnnnnnnnnnnnnnnnnnnnnnnnnnnnnnnnnnnnnnnnnnnnnnnnnnnnnnnnnnnnnnnnnnnnnnnnnnnnnnnnnnnnnnnnnnnnnnnnnnnnnnnnnnnnnnnnnnnnnnnnnnnnnnnnnnnnnnnnnnnnnnnnnnnnnnnnnnnnnnnnnnnnnnnnnnnnnnnnnnnnnnnnnnnnnnnnnnnnnnnnnnnnnnnnnnnnnnnnnnnnnnnnnnnnnnnnnnnnnnnnnnnnnnnnnnnnnnnnnnnnnnnnnnnnnnnnnnnnnnnnnnnnnnnnnnnnnnnnnnnnnnnnnnnnnnnnnnnnnnnnnnnnnnnnnnnnnnnnnnnnnnnnnnnnnnnnnnnnnnnnnnnnnnnnnnnnnnnnnnnnnnnnnnnnnnnnnnnnnnnnnnnnnnnnnnnnnnnnnnnnnnnnnnnnnnnnnnnnnnnnnnnnnnnnnnnnnnnnnnnnnnnnnnnnnnnnnnnnnnnnnnnnnnnnnnnnnnnnnnnnnnnnnnnnnnnnnnnnnnnnnnnnnnnnnnnnnnnnnnnnnnnnnnnnnnnnnnnnnnnnnnnnnnnnnnnnnnnnnnnnnnnnnnnnnnnnnnnnnnnnnnnnnnnnnnnnnnnnnnnnnnnnnnnnnnnnnnnnnnnnnnnnnnnnnnnnnnnnnnnnnnnnnnnnnnnnnnnnnnnnnnnnnnnnnnnnnnnnnnnnnnnnnnnnnnnnnnnnnnnnnnnnnnnnnnnnnnnnnnnnnnnnnnnnnnnnnnnnnnnnnnnnnnnnnnnnnnnnnnnnnnnnnnnnnnnnnnnnnnnnnnnnnnnnnnnnnnnnnnnnnnnnnnnnnnnnnnnnnnnnnnnnnnnnnnnnnnnnnnnnnnnnnnnnnnnnnnnnnnnnnnnnnnnnnnnnnnnnnnnnnnnnnnnnnnnnnnnnnnnnnnnnnnnnnnnnnnnnnnnnnnnnnnnnnnnnnnnnnnnnnnnnnnnnnnnnnnnnnnnnnnnnnnnnnnnnnnnnnnnnnnnnnnnnnnnnnnnnnnnnnnnnnnnnnnnnnnnnnnnnnnnnnnnnnnnnnnnnnnnnnnnnnnnnnnnnnnnnnnnnnnnnnnnnnnnnnnnnnnnnnnnnnnnnnnnnnnnnnnnnnnnnnnnnnnnnnnnnnnnnnnnnnnnnnnnnnnnnnnnnnnnnnnnnnnnnnnnnnnnnnnnnnnnnnnnnnnnnnnnnnnnnnnnnnnnnnnnnnnnnnnnnnnnnnnnnnnnnnnnnnnnnnnnnnnnnnnnnnnnnnnnnnnnnnnnnnnnnnnnnnnnnnnnnnnnnnnnnnnnnnnnnnnnnnnnnnnnnnnnnnnnnnnnnnnnnnnnnnnnnnnnnnnnnnnnnnnnnnnnnnnnnnnnnnnnnnnnnnnnnnnnnnnnnnnnnnnnnnnnnnnnnnnnnnnnnnnnnnnnnnnnnnnnnnnnnnnnnnnnnnnnnnnnnnnnnnnnnnnnnnnnnnnnnnnnnnnnnnnnnnnnnnnnnnnnnnnnnnnnnnnnnnnnnnnnnnnnnnnnnnnnnnnnnnnnnnnnnnnnnnnnnnnnnnnnnnnnnnnnnnnnnnnnnnnnnnnnnnnnnnnnnnnnnnnnnnnnnnnnnnnnnnnnnnnnnnnnnnnnnnnnnnnnnnnnnnnnnnnnnnnnnnnnnnnnnnnnnnnnnnnnnnnnnnnnnnnnnnnnnnnnnnnnnnnnnnnnnnnnnnnnnnnnnnnnnnnnnnnnnnnngatcacttgagatcagaagtttgagactagcctagtgaatatggcaaaaccctatctctactaaaaatacaaaagttagctagacgtgatggtgcacgactgcaatcccagctactctggtggctgagactggagaattgcttgaacctgggaagcggagcctgcagtgagcacatctcgcacccctgcccttcagcctgagtgactcactaaaactccatctccaaaaaaaaaaaaaaaaaaaatgttgtcagtactactcatgatgatataaaaatgtaaggtaatttttgtcaaaatcccaatggtattttttttgcagaatttttgtgtataattctaaacgttgcttaggacaggtgactagccaaacaccctttaaaaagaacaaagaggtattacattttctgattcaaaatcatgatacaaagctacaaaaataaaaacaatgtggtattgccacaaaaacagatacatagatgacgaaacagaatagagatcccagaaataaacccttgcatatgtgataaaataatcttccgtaagctttccatgaccacacaatagaaaaataagaatccatttaacaaagagttttccaaattgaatatttacagagaaaaaaataaagttggatgcttcctttgtatcatatataaaaagaaaagtttttaaaatgaattcaatacttaaacataaaacctaataaaattcttagaagtaaacataagggaaaagtttatgacataagtcttaaaactctttccttaagtttgacatcaaattcataagcaacaaggaaaagaacaacgaccaagaaaagggactacattaagcttcaactattctacacatcaaataaaacatttagtgccatacaaacgtcacctaataagtgggtgaaagctaggcatggtgtctcatgcctttaattctacaactttaggaggccaaggcagaacaatcacttgagaccaaaagtttgagactagccatgaaaacatagcaagaccctgtcttgtatagggttatatatatgcatacatacatacatataactaaaaagagtaaaaatattttctaatcacatatttggtaggtgttaattttcaaaatatataaattcctaaaactcaacaacaaaaaaagttaataacttgatttagaatggcacatgtttgaaatgactttctccaaagaagacatagaaatgactaggcatttaaaaggatactcgacaactctcttctagaaaaatacaaagaaaagtcacaataatctatcacatcaaacctatttttaaaatagtatgaaagctcttcaaaaaatttaaaatgagattattatacaatccagcaaaccccattctggctatgtatttaaaatatacaacacatgatccggaagagatatttgcacacccaaatttattgcagcattactaacacaagccaaaaggcagaaacaacccagctgtcccttgaccaatgaagagattaacaacaagtggcacatacacaaagtcgaatattattcagtctttaaaaagtcacattatatgattattcttgagaatatcacgttaactgaaataagccaggaacaaagtgacagtctatgattccattcataatcaggtatcttaagtagacaaactcatagaaaaaaaaagttagaatggtgtttgtcaaggactgaagagatggtaaaatgggcaattgtcttaaaagacatttaatgttagttttgcaagacatagaagttctacagatcttttgcataactatgtgaatgtacttaacgctaatgaaatatacacttaaaaagaattaaaatggtaaattttacattatgtgtttttaccacaatcgcaatttttaaaaggaaaaatatggacttataaagctttccaaaaattaaattttgttcacaaaagattttctctcacacaaaggaagtatagatttataattaaacacattgtgaaattaagattatttcaatgactattcatccacacaagataagacaaccactgaaaatcagccaaaaaatatggaagataagccatgagcaaagttggggacatatttatagagacaaacacatatataatttaattttgaaaacgtatgaccgatttatattttaattaaacccaacattagtttcctgagtgaaatttggttttcagtttgggcaaatgaagacctttctgtggttaaaaggattctttcttctccgtttcttcatatggacctgtgctggggattggtcagctgttcaagtgcaatgcactcagttttggttctgtgccaggattaaacctacgatatttcacatttcatatataaaccccgatgaagtgtttctaggagatggctgcctcataacctatattttgccaaatgtttactatgaatttcaccaccatcctcttgaaggtggtattgtaactaaaactcttcaggacattctacttaaaactaaaatcacgtatatctcaagaaactcctttctgatttgaaatgcctctgtcatgtattgtctgcaatcagcctcctctttaaaagaaagtagaaaggacagatgaggaaactgatagtgttactgcatgggagacagaggtgaggatacacatggcggatgaaaacatggaagttatttctacagcacgatcttgtaagtgtctgactgctatgctcccttgtatatcaaatgatgtacctttattgcaagagaagatagtgcgctgtttaccttgacattgagaggcaattttgaatctctgtcgtgattgtttaggactgaggatttaatgtgctattttgtggaaatcttagaagcagtaatgggatttaatgatcttaactatcatccttctgaaaaatctaacgcgattttaaataaaatggccggctgcttccaccgttccctttttaaaccaggagctgccgttgcttttaacattacgaagttgaatctatgaatagtttgtactattaacatttttttaaaaatccacattgacttgaagtgtacaggcagagttggaaattataacatccaaagttataatacataagtaaaacccaaaataaaatcaactgctgccctggaacctattataaataatcgagacagtaatatggaattgtaaagaaaaataagaaacatatttactcataaaatcttgcaagcaaagtttttttctttttttgagacagagtctcactctgtcacccaagctgaagtgcagtggcgagacgacggctcatttcaacctccgcctcctgagttcaaaccattctcctgcctcagccttcactgagattacaagcacctgctaccagaccaggctaccttgcatataaacttgatatatcatttatgaaaatactttttagataactaaaatattctactgtgactgtgcattcatgaagttcgggtatcttgaatcattggcatgcagtgtgtgacagtaaaatttcacagaaaatacactgtaaccattaataaaaggccctaataagagaattttaatgcataagaattgaaaagacaccataaataatttccgttgtatttttaatacactgatgctattcttacacaaagtaaaaaggctgggtaagttgtggtggctcacacctgtaattccagcaatttgggaggccgaggtagcagattgcttaagcacaagagttcacaacatgcctgggcaggatagggagaccctgtctctgcaaataataataaacagccaagtgtgttaatacacatttgtggtcccatctgctcaggaggctgaggcaggagaattgcctgagcctgagtggtcaaggctagagtgagctgtgattatgcattgcattccagcccaggtgacacagtgagaccctgtttaaagaaaaaaacaaacaaaaactaaaaattaaccaggagtagtggcatgcacctgtactcccagctacttcagaagctgaagttagaaaatcatttgagcctgagagtttgagtctgcagtgagccataattgagctactgaactccagtctgtgtgacagagcaaggccttgtcatagatagatagatgatagatgatagatagatagatagatagatggaatacacctggagaaagagtaaattttaatgtagtgtgatgtaatttttaaaataaactttatgtgtgtatcacttagaaatttatagaacaggccgggggcggtggctcacgcctctaatcccagcactctgagaagacgaagtgggcagatcagggggccggatatcgagaccaagaccatcctggctaacacggtgaaaccctgtctctactaaaaatacaaaaaattagccgggtgtggtggcgggcaactctagtctcagctactcgggaggctgaggcaggagaatggcgtgaaaccgggaggcagagcttgcagtgagccgggatcgcgccgctgcactccagcctggacaacagagcgagagtctgtctcgaaaaaaaaagaaatttatacaacttagccagaagaataaaaaacaacctcttaacagttttttcaaataaaaaaagtgagtttgaagagaagggaataaaggggactttcagtttaatgtgttttttattttttgagtcagggtctcactttgttgcccacatggaagcgcagtggtgtgatttcagctcactgcaaacttggcctcccaggctcaaacaatcctcccacctcagcctccctagtagctgggaatacaggtgtacatcaccacaactggttaatttttgtatttttgtagagagagggttttaccatgttgctcacactggtcttgagcttctgggctcaaacaattcacctgccttgggctcccaaagtgctgggattgagccactaggccaaccaagttttttgtttggttttgtttttgagatggagtctcactctgttgcccaggctagagtgcaatggcacgatcttggctcactgcaccatttgcctcctgggttcaagtgattctcctgcctcagcctcgtgggtagctgggattataggcacccgccaccgagaccagctaatttttgtattttttagcagagatggggttccaccatgtcagctaggctggcctcaaattcctgacctcatgatccacccacctcggcctcacaaagtgctgagattacaggcatgagtcactgctcccggcgaccagccaagacttttactttataaagatatttatgatgttttcttttctttttacagtacgcattgcatttataattggagatacaaaaaaaggtgactgttactgtttgacagcaaggcagtagtattatcttcatcaatatttgcaacttaattcgcaggaacctgtaagagaaagcccagacaaaactttaaggcaaagaagttacacttgtaaaaaatgagaggactatttttttataataacaaatattccaggtgaggactggtcaggatctaccactgctccatctcacttgataagtctcatgcctgccagggtaagaaggagcagagagaaggacaaatgccagtgagtttcctctcccactaaggatctgtttgtcaagtttcctaccatcaagtggaagatgtactaaaaataaaatgtacccttgcagatgctagcagagaggcacaaaatagaaaaggaggtaagcccatatattgtggagaaagagatccaacttaagattcaaaatgcaccagaaagctgtgtaaagttaataaaattactcaaaatcttggaacatttgtttcctcacctgtaaaatggggatcatgtgcctacttcataagttgttttgacagttaaattcacagagatatttaatagagcctgctatggcaagtgttcacattaacaaagtagtatcaaacttcaaaatatgggaaaggtattttgaataatgtctatgaggccaaggacaacatgcccagcttcacaatcaatcccagccacattacactgaggagatctacaggcaactatatttcttcaacaaattccattagagaggaagagtgtgtagtctgaaaacatgacacaaatgtgaccagtgtacagtgacttaggtagtcgggggtggaatccctacatattctctgaattgcagctacacagtgagttcccaggaaacaaatggaatagaaaaggtgacacaaaatatactaccataaatggggtgagcatagcaggttcacaaccacaaatgtaagcaggagactcaaatcaccaggagcacctagatctgtgaacagcagcttgtggtggcatcaggttcaactttctgagaccaccggtgtgggcagtgtctttgcaggcacatactcggcagcagtgtatctgaagacagatctcaaggctcttctcttcactaattattaagatgatagatgatggataccctcacgttacaacatccccactaacgctgtggacaagtgaattcagaaacccacacctaaatacacagtgaagagtaggatgagaatactgcaggataggttaggaatgcaggcattcgaccccatagagtctatttaaaataagagaagggccctagtattgtgctgtggtcctcctatatatagttctttatttttccaatttcataaaggccatacagtttttcttcctttcttcacaaatgtgctgatgaacccatgagtaattcatcctgaaggggttaattcctcataaagtacagtaacgtgattcaattgctatgatgaggtttttcaggatttttttatagtgtcccatactcaccgatcacaagtgaaaattataagaacatgtaatttgaacaaagtattcttttcacatagagaaatacacaggtttatacagattagatgcatcatcaaagttggtaacatctgggaacaaaaggaactatcctgaggacataaggaacttagggacgtcgattattaagaggctacctgcaagtggaacttctgggttttcattgtctagacagaaaaatttaactcataagccccagtatattaaggtacatccccaacggctgtgggggatcaactttccatccaaagcagagatgtaaaacatgaatgacttcaaatgcggctcaagtgctctgcaccttgaaagtcatccccacaaagctggagcaccacctgttcctgagggatgaggtcaccaactgcttttttgagacactcgtcagtcaggactcagttgagatgaggctggtgatttcaactgtaaaatatctaaaccatcgtctttaggtagattcttatgcctgggaattgtggttttctcctctgctgttagcagatcctgagtaacccaagaaatacccgctctcacccgtcaagttctatatcacaagaaaggcgctgcagacggtgacattttcacgaaggagccacagcccgcatcaccccctgaaagctctgaagttgcgcacgggtgggtcacgcagcaggtggatgtctcagttcccatagagtttagcagagcaggcggctccctgggctggaagaggtgcgatgctctggaaaccccccgcgggtgtgtatgtgagaggacaccgagatgttcagcgggctgttcagtgaggaccagacccctccgatttgagcaagggaggtgcacttcgcagggtcacaccgtcctcatcgcccagcctagacctgcccctcaagtccttctgcggactcccttggcgagggggtggcacagaatcagcatgtggcatcgcttaggaaaggacgagtccacaccgccctgtccctccctccagggctgcgcaccacggggtaggacagacagcgcatgctggttttgtagttagcaggtcggcgaccaatgggctggaaaccgttaagacaccataactcccagcactcctagctagggacgcgcctccctatccttcgcttccatactacacaccgcccccaaacccagcgcatgctgagattgtagtccgttagcctcgcgaccaatgggctggaaatactgaaaggactatgactcccaggatgctttgcgaggtacccgccgtcccgatccttcctctagggctgcgcaccgcccccaagcccaacgcatactgggattgtagtcaggtagtcctgggaccaactgactggaaactgttaagagaccataactgccagcacgcctggctaaggacgcacctccctatccttcccttcagtgctacacaccgcctcgaagcccggtggctgctgggattgtagtctgcaggccgggggccatcgctggaaaccgttaagagaccataactcccagcatccctggccagggacgcgcctctctatccttccctccagcgttacacaccgccccaatcccggtgcatgctggcattgtagttcggtagccttgcgatcaacgtgctggaaactgtttaaggactatgactcccaggacgccttgcgagggacccaccctgttgacccttcctccagggctgggaacctcccttaagcccagcgcatgctgggatcatagtccgactgccgcgacagaaaggctgggagtggatctgagactacagttccaacactacggggaaaatttcatcttctctgagactacagttccaacactgaggggataatttcatcttctcctccgcccctccatgtttccagtgcaattccgccctgctgaggggagcctatctgttcccaaacttctgcgtgcgaggagacagcgtggccagggcaggtggtctcacttgtaattgtggcacagtctccccacgtgccagttgtacgactatttgtgcctgaagtttgatttctctctgacaagacagagcccgggagcctccaacagcctgcccagcgttgctgtaacgcttgctttcggggagctgggcgcgcccagacctttgcagggcccctccctcagccccgacccttctcctcgcccctcccctgccacgcccctttcgacatgctggaaagtcatctacctttaataacagtcatctttgcaaaaaaaaaaaaaaaaaaaactctgagaataacctatctcccattctatttagtatttatttccatagtatccataaatagtagcaattagatatcacagcaagtcaagcaaaagccctgccttgcctgtttcataaaccacgatatggccttgctgtggttttatttgtattttgttttgtatttattgaccttttggatataaatatttaggtatttggacagtttttggaagtattccgctattagttgttgatttacttctgttccctatttaattattttttgtctctcccttctccttagactcagtcattccacaggtctcgagagttctgttcatttcctttaaactttttgtacttttttttttccagactggataatttctattgctgtgtcttctgttttaaatctatggctaaactcaaaagatttttttcatttccttatctataatttttttatatatatgttcatttctctgctgaagttccacatctgtttgtttatgaatagaatattttcttttttccccatgaacatattcataaaaactgccttcaaattcttgtctgctgattgcaacatcctgggatagcttctactgcctgcttttgatattgtgtatggatgacattttcacgtttctttacaagtcttatgaattttaaaattgtgcactagaaactataaatgataattatagaatagaaactctggattttgctgttttaccttgaagacttttgttttataaacagggttcattgggctagtgtcaaaccaatgcttatgtccgctacagtgggtatagctgaaatcttcattcagttgttaaacacacatatcatatatgtattatgcataggcgtttttctataataatatattttattcaagtttcatcattgttatttgtgagagttcaacaagctagtccacacttagtggaagtcagaacctcagttttatttgattgtagcattttatataaacaaaattatatagtatgtatacttgtacatctgttttctttatttccttttctgttttctttctttctttccttttctgtcttctttctttctctctttctttccttctttctttctctcttcttttttctttctttcttttccccaggttggtgtgcagtggcatgatctcactgcaacctctgcctaccaggcttaagatatccttccacttcagccttttgagtcactgggaccgcagccttgcaccaccatgcccggctaattgttttgtatttttggtagagacagggtttcactatgttgcccaaactggcatgtctgctttcttttatgcaacattacatttgtgatattcacccaccagttgcaaatagctatagtctgttcattttagaaagtagtttttaccttttagtaaaatataaaaatacatgaaattaaccattttattattttttttgtgtgcagtttaaagaaattaaatacattcacattgttttgcaaccattgtccaagttcataaggaactgtttttcaatcttttaaaagtgaaactctgtacccagtaaacaacactccccttccattgccctttgtgtagtccctggaaactactcttctacttcgtgtttctatgaacttaactgctgtaaatatctcatatgagtggaaagagacaatatagcaaaaaaatcatgaggaagaataatatatactatataacatatgtttatccattttaagaaaaatgctagcagagatcaggtcatggtgtttatagagaaaggtaggtaacagtgaaaaagggattggttgcattaaatttacgacgtgatgcctcaagtgccagagtagtgagctttctgccccactcgcagggctggtcaatggtgtggctggaaccctacttgagctgcctgactgccagagcccatgcttagtacaaacttcaatgagccatgaaagcaattccaacaacaggcacttaatggctctgagattttatcacagcctgttcttcatggctagcaacttcagagaagagtgacagctgtgaggttccagaagccacacctcaggtcccccagttcctccccagcagctggagtccaggtgcaacaggacctgatgccggccagggaaccatggccacacgctgtgtgaggctggcggcaagacagtctcccctcctaccctctgctcatctgctaggtctttgccttttattctgattgtgctgctccaggcttggaacaaagcccgaaattcctcttgagtctgaagatgatgatggtttccagctgtgtggaactgctgcatctcctggaggactttaatcttctggaaacagagggaaagacaggatgctgacagggcctgggtgaaagactctgtaggggccttataaaagaagggaggagggctggtctctgaggtgtttcttttaaggggctctcacctcccctccaatatcatgcagccctaactggttctcagagttgaatgtaaacggcccttcctctaggaagttgtcatcaacttcactcccctgattgcaccctgcattaggataggtctcctccttctctgtgtattactccctttcaataaatcttagatgcggaagaagggaccagggaatgtcctgcccagggtgatttctcatttccacctccaccctccctcaaagtgaggacttcagctactgctcacctttctgtttttctgggttttgatcacatttctctggaagacagaaagccaaagaccatcagaaaggtccgctggtccataactagcctccatttccagcgatttccaagcttcaccactaccagagccaccagggtcagggaatgtgcacaaaagaggtcttgcagctctgcagcttcactactcagggagtgggactgatggctgctgtggagcctccatcactcatgagtaaaataccctgtttacgggatggggagggctgcgaggccctcgcaaaaaattttggcaaggactgagatctaggagctcagttcaagactctcttctcccaggcctcaggatcctggtccctgacctgtcttctccaggctcactcacatccacacactccttcatggcaatgtccagcatcaccacatcagtgaggaatgtccccagagagggcatgacttgggaggtgcccacccaagtcctgtccgctgaactcttataaacccctgcctcctggcgccctctacctaggttacccacttggagtagctgagaaccctcagctgccttttcccaattctctatgtcttcccattagctggcctctattgccaccaacctcaccataattacctccttggtgggattttaacaagccacaaggtcatgtggtccctggctccacctgttttaaaagccacacggagcccagctctcccaggccttgctctggtctgtctaatgaaggtgttttaggcactgcagccccaggagaaaagggctggagtagaaaggccctctgcttttttgatttggaggtttccagctgggagaagtaagctctgttctctgaaaccctggagcccttccccatcacagacacattcaccttctgctgtcacagcctcatctaagctctctgaggctccgctacagggtagacaacttgtacggtgttcacctgctaggatgagggacaaggtcagtgaaaatatgcttctttcagttacgcctcagccacactaaccttggacacggataagtggcctgagtcagcttgtccaatgctctgaccatctccagtaagctctgactctagactcactcccaggtccaacactccctggatgtgtcattttgggcatgcagtcgggtttccctgagctgtttcctcaactggaaagtgtggtgggaaccaaccacctcacaaggcctcttaccacctcggtttcatgtggttgtcatgattgctgtcaccatcttccctctcaggatgagccagacacaagcaccctcagattctctgtctccctgagccccatcaccaccttgtgaggcctgcccaacaggctcatcattcctacattttccacataagaaaacagaggcccaaagcggcaatgacatgccaaggaccccacaagagaggccagctcctccctcaacctagagggactgtcccggctgccttcacctaacaccctagcatcatcactgaccagcattccatcttctaaactctatgagtgacaatattcccagccaggccctgtggcagtggacatggttctgagaattgggaatctaatgtggaggaaaagttaaatatttaatatgaactcaattgaacatgggcacaaacaatggtcacgaagtcctggaacaggttgcatgaaccccttgaggtgttcatccagcgctgtttcagagaaatctttcaatccattcctatacattagttattgaaaaaacaacagacaattgcaaaaacaagttgatcttttgtgttccttgagcccagttgtgaagggcacctgtgactgcgcctcatgccaaacaacacattacaaaaagagctagggtcccagactgtgctgaagtttcatgagacctctcctcatctgtgcatggacacgtggctgactctggagcccaggctgttgcttcccagtctggtaatgaatcctccatagtctggtgcgtgtaaatatacatatacatatatgtatatttatatacatgtatatgtatataaatatacatatatatattttctttctgtccttcccattgcaatttgcttattatattatttgcttatcaagtctgtattgccatacacttgggataaaggctatttatccttaaaactattgtgggtgccttttcttttcccctcgttcatttcccgcaccggagcccaggtgatggaatctcgaagtgacctcacttccttagttacaaactcaaagaaagtttagaactctggtaacctggagccctaattctagagacagctttgtatttactaaggagactctgaagacagcaagatgttctcctgctatgtcttgaatttctgaggctctcatctcaggaaggcttgaacagagagacttttttttatgatggagacagtgctcattctgcactgctggctcttctggccatttggaaagggttacccatagataacacaaggccacccatggcaggcctatccaggccaggcctcacctttgatatcatctcggcaggcacacacccctcctcatctccacgtctcgtgggaaagaaagagataatgggtcctttcttggcaggagcaggtttccaggtattgggaggctaaaagcctgtcaaatttataccgcaggttacagttggcaggaggggaaggtgagtgctgggggtcacctttgtttgttcagacatttattctaaggcttcaagctgtcctcttgttttctccctggctggaggtctgcgcaaatgctcctatgtgcctgatctggggagtagactttctaactggaatttcccctgtggggaaagccaggatgccattgatgcctcttggccaggcttccaggcactctctttgcagaactctattgaggagatccctgaggagctgtttgatgagtccaactactccatctcattgaacaaaaggcaggtgcatcatgccaacaaccatggcccgtgctagtctggagtcaaggtgggcacagagaggtctccaaatggaaaagaccagggaagcccaggaccctgacccaaatgtgaggattccccagaaaccgttttagggctttctccattaaggacccacagttccttcccagaggaatttggcctccattagtccataatggcaacttaggtgcacagtccctggtcatatgcttgcaggaatgtcaaaagaaacacttttgtgttgttattactttacattaagttgtgagtatctttgcattttgctattatttttattgttatatctacctaccccacatacttcctggagcaggcagcttcgctgccttgccagaccttctctaagtcttagaagttcacactgttactagagagaggtttcacccaaaaagtgggagttatgcaaaagggtcttatatgactctttacatatgtgtcccagagcccacctctatagccccatcaggacaggagctgtgtcctcatatgtctttataagattccataagtggggcctttccctcagtaatttaggcttttaatactggtggagcctgacataataaattctatttccacttcagccatgctacagggaatatctttttttttttttttttttttttgagacggagtctcgctctgtcgcccaggtgggagtgcagtggtgcagtctcggctcactgcactctgcctcctgggttcacgccatcttcctgcttcagcctcctgagtagctgggactacaggcgcctgtcaccacgcccggctaattttttttctctgtgtgtgtgtggttttttttttagtagagacagagtttcaccgtgttagctaggatggtctcgatctcctgacctcgtgatccactcgcctcggcctcccaaagtgctaggattacaggtgtaagccaccgcgcccagccgctacagggaacatcttatctgtgtcctaataggctgtaacgctttgctatgacttccctaatacagtaccacaggctgaagttctttaacaacaaaaactgaatgtcgcacaattctggaagttagaaatccaacctcaagctactggctgtgtggtttctctgaggtctccatccttggcttgtagatcgtcatctactatatctgtgttcacaagatcttctcttgtgcttttctgtccttcctgcctcttctaataagggctccagtcatctggaattaggatacaccccaattaattcacttaaacctaactacatttgcagaggctatatgttcaaatatagtcatgttctgaggcactaggtgttaggacatgaacatataatttttaggaagggaatgcaatctagctcacaacatttactaatcccttgtagattatagtctcccaggaaaatgattactcagtgaaacagtaggaaagtgtaaaggtttaataggagaagccggaatatattccaaaagggttgtgaaagccgtactgtaaatagtagtttctgaatttatctgcttttatgtatccagaacctcttggttgtcaacattcttttaatttttttgtcaatctgctatctatgtggcaaaaaaacatgtttctatttcaatttttcaactgatatatttgagttacctttcagttgatttatacttatttgagttttctgttccctcagttaatccgctcaattccttggccctgtgaggggtttctctcaccttggagtccccaagcactgacacctttgtcaggtgtggggttgctgtagttatttctcaacactccctttaaggttttaaaagacccagttcagttgctttaagtcaaaagggttgtcttagggtatcttatcctgtgccctgtctctaaaacagaaagaaagtgagccttccccatgcccttccccctaagtcagggacagacatagagcctcaggtagcttaaagggaatttcatgcaacccccaccgtggaagattctctttcttacttgtgtttttctgagcagccatttgacatcacaaagctttattttctcatttgtaggctgagtatgtttttttgggaattctctgggataatgctcttcataaagattattaatacaagtgggtgctgttgtcttacagctgatatgatatcgtgaaggccttgactgtattcatggattaattattctctacctccacattaaatttgatatcagaggcctaaaacctttttcaccataaacacccatgtcctccacatgcccaagtctctgaaggatggagatttcctcatccaagctccacattccaagcctctggtgtttcatggtcttgccatgaaaagtcttgtcccctccccaagaggaaatgagtctattcttaacctagaggtgtgaatgatgccaatgcgccaaaccaggcacaacggagaagctgacgaagtccctgacagcagccttccagggtcaaactctcttctttttatcatttttctcaagttttaccaggacttcctcaccactctgtagttcctggaccagctgtctagtagttgagcatatgtcttctccaaggcacagtggtgactctgccagctactaactgtgtcttagcataccagtgcatctttatcagcctcaatttgcatctttatagagaattgtaaaatgaacctctgttctgtacgagagacatgcaaggggagaagaaaacacacccaaaaaaacctttaagggtaaacaagctttatctgacgtaaatggcagtgcagctataataagcaaattgcaatgggaaggggagaagggaaacatatatacatatttacgcccaccagactgcggaggattcattaccagaccgggaagcaacagcctcgactccagagtaggtcacccatccctgcacagacaagaagaggtcttaggaagtttcagcgtggcctagagccctagttctttttgtaatgagttgtttggcatgaggcccagtcacgagggctcttcacaactgggctcaaggaacttgaaaaggttatcttgtttttgcaattgtctgtggtttttcaataactaacacataggaatagattgaaatagatatttctccaaaacagtgccagatgaatgcttcaagcggctcatgcaacctgtctgagacttaatgaccattgcttttgtccatgttcaattgaattcaaatttaatatttaactttcccccacaaccttatatgttttttgtgagaaatgaatggcatacaatatgaaaagtggtttcctaatgctcggctttgtggaaagcctgctggggcatgctctgattgttcgtatttattacttttttctcttctttcaccccagaaggtctttcatgtcacagtgactcatgtccctctataattagacaatcatatagaaaacaaacatgttcttacatttgtaaagggcacttgagcttcctgttagctggactttgtccttgaaacagagagatcctgtaggaaagagtccccaggcacactcagacatagctaaaaaggttgtagttagggcttatttattcatcacatatatataacgcagttttccagacacttggcctaattcagtgaagacaacagatgacagttcctgggccacaatttacttcagggagtcagacactcagagtggacattataagcaggtcatgatcacagaatgtgagaactgatgttctcatgctctcctctaggaatggatgcacctgtcagcttctgatcagaacgacagacccaggatcaagcataacatttaaatagacgaataaaacttttttccaaaaaggaacatcgctttatgataaaaactctcaacaaattaggtgtaaagtaaattcacttcaaagcattaaaggccatgtattacaaatgaatagctgggcgggcagatctgccataaggcaagggcatccgcttccctagatacatatccaggggcacagagaatgagcagttccagggttgtgtctcacatggggtcctctccaggtcggtttcaagaggacaggactggggttctgtatccacttctgtggagagctggaagtaaaatgagctatgctccacctcagcctaatgtagacaatggctacagagaagactgttttcttcctcataaataggggtgctcgaagtgggtaaccttgattgtttcacatactcataagtgtctgccagccttgattcttcattggtgaactaagactctttgctctgaaactctgcagaaatgcttctactccctggaggcccttcaaatcagagagaggcatggccactccagaggcattttgggtagataaagatgggatagagctaaacgtgtcagaacactggaccctgagtctgaagtcatgggaaaatgccagttcctgttgggtttttgagctcctcatttgaaagtcgtattaaataatttccctggataaggggagggtgcctcatgagtaaatggcacactccaaatggtggaggcaaagagagggcaatggaggattccaaggtcactcagtgtacttggagccttcagattctgctcctttgtcctctggaactccaaagagtcagtgtcttgaggacacaaaacaatggtacctgatttgttccataatgttcctgcatggggctgcagtgttagtgatggcctggaggtggttacagcctgctgtgtttctggtgcctattgagctttgctggagcagctggagcaagtaagagtcacacacctcatgttattatcaacaatttccacattgcccacttagccaatcttttttcccttgcactcaccctttgccagctaccctggtgggtccaacatgtggcacagaaaatgattacatcatgcctgcatacccctccaaggacagaacagtctgaagtcagctcgacaaaagcactaaagcaagtatatataaaagaaaagagcaaggactattatataaagtagaatgttgagaagaagagctgcaaagtcattgaatggggggacccaaagtcctcactgaggtgatctttaatccatgatgagaatgataacagggaggcatctctgcacaagaatgtgtcagtgagaagccacccttggtgaagagtcttacaggtgtgagtttggcagagattagaaagggaccaatttggtacagacagcctgaggaagagataagcagaggcatggagaatcctggggcttgggagatgaggctagatatctgctcctttctgacaacattgccctaaaacttagcacctttcaatagtatatagtatctcacaatttgtgtggaccagaatctggacacagtttagttagctgcctctgccttcaggtctcttatgagattggggctgtggtctcaactgaatgtggaccggaaaagcatcaacctttaagctcatgcttgtgaaaattggcagggttcagggtagactgagagcatgactttacttctgtctactgcctgagcactccctccgttctttgttatgtgcgtctgtacatagagcatctcatagcattggagcttgcttcctctgtttgaggaatacaattgagagacagaattaggcaaacagtttcacacaaagagacataaagaaatggaaagactgaggaagcaaataggaaaaacccagtaggaggaataatgacagctttaaaaaaacttgagagttacaataatttgtattaaaattgtaacccccagtgtaatgctataaggagataggttgtaattaactcctgaggttgaggccatcatgattgagattactggctttacacaggaaaccccagagggatgtctgtctccttctaccaaatgagaataaaatttgatgtgtgcagtctgaaattcagaagagtcatcaccagagctcaaccatgctgataccctgatctcaaatttccaacctctaggagtgtgagaaattaaatcctgttgtctataagctgtctagttcatggttctttggtatagcagcctgaactaatacaaaagtcatacactattctgtattccatttgacagaagctgaatttgtgccttcaaactgttaaaaaaaaaagacttaaaaattggatattcagaatgaaagataagaaacagcttgttgaaacacttaaatctcctctgcttataagattttaaaaaattggctgaaatatgttggaagcaatatggccaactgaagtccatggagaatgagtttgctgatgttagagcccaaatttccgttgcatgtttcatattaacactccctgaatattcatgtgacctgtgaggaaacaagaggagatgactgtgcatgtctcatgactttccatattactactttccttccagcaatcccctcctaatccagagcccacttcttaagcattttttaatcaacaccttaaagcctatataaggaaactgatttcagctggactcctgtctcctgttggccaacctacaacaagatgccatttttctcaaaacccaagtgccatactactggcatcgagcagtaggtcattttgttcaataacaaactgagtcactaaccacctagtgctgggagactttgtgaaggctttccccaacttaggtgagataaggcacatggatataattctatatataataagaagtcactagaaagtttaatagttgtattagtccatttttataccgcaatgatggaatacctgggactgggtaatttataaagaaaagaggtttaattgactcacagttccacaagattgggtgggggaggctcagaaaccttccaattatggtggccaacaagtgaagtgagtgagagcaggggatacaccagaagcttatgaaaccatcagatctcttgagaactcactcactatcacaagaacagcataagaaaaacccgtccccataatccaatcaactcccctcaggtttctcccttaacacctggaggttataatacaaaatgaggtttgggtggggacacacagctaaaccacatcagtgccagaggatgatatctacatttaatttcaacctcgtactgcagcagaatgaaactgaagcccagtggggaagtgactttcccaagattacactgctggaccccaggcctacctgagttgtggcccatgctacctcccacctattctcctaatgcttccatctctaagtgtgtgcattatttacatgtgaaactacaccacgatttttacattttatcttatatacatctgatacattccctaggaagtagataacattatccccactgtgcacgctaggaggctggggaagcctcaaatacacagtgacttttattaggtcccagagatggtaagaaaaacaaggttattttccagctgtctcttatatcctggaacccaggatgcatttaggtctttccagggaattaaggggaagttgtgtttgcataattgtgtacaaataaagagttgacatggaagaggagactgagcaatcaatagcatagtggggcctttgggtaggtcttatagaaataaggggcccagtagatggaaccttgaagagtttaacacactttcctggtgacagaaccccacagcagttaagaaaccaggaacccacattcttgagacagctctgtatccacctctgttggtgagagatgctcaagagagtgagatgtcctttcattgtgccttgatatttctgagttctagccttacaaagcctcaatgtaaaagccttctctgataacacagatatcaactcagccctcattcctgatacccctggccattggccaagtgcacctacagataacacagagcagcccaggacatgtccatcgaggccaggcctctctcatcatctcatctgggcagccccacaccacttctttgtaccatgagttgcaggatggacaaaagagagggcacacttcttgggcagaagccgattgtcaggtgttggaactcttgtgtgtttgttatgttcatattcaggtcagagctggcagaataaaaataagagagttggggagtgagtctgtatactcagatgtgaatagcaagactccaacctgatctctggtttccttccttgctggagatttatttatttatttatactttaagttctgggatacatgtgcagaatgtgcagacttgttacatagttttatatttgccatggtggtttgctgcatctatcaaactgtcagctaggttttaagccccacatatattagatatttgtcctagtgctctccttcactttgccccctgacaagccctgatgtgtgatgttcccctccctgtgtccatgtgttttcattgttcaaatttcacttatgagtgagaacatgtggtgtttggttttctgttcctgttagtttgctgagaatgatggcttccagcttcctccatatccctgcaatctgaggtctctgttctgttccctctgtctatatatctgttttggtaccaatatgacttcctctcttcctatttgcataccctttatttctttcacttgcctgattaccctggccagaacttccaatactatcttgaataggagtgctgagggaggacatccttgtcttgtgctggttttcaaagggaatgcttccggcacttgcctattaagtatgatattggctaggggtttgtcataaacagctctgattatttcgagactttttccgtcaatacgtagtttatttagagcttttaacatgaagggatattaaatttaatctaaggccttttgtgcatctattgagaaaatcctgtggtttctgtcattggttctgtttatgtgatggattacatttattaatttgcatacgttgaaccagccttgaatcccagggatgaagctgacgtgatcatggtggataacattttcgatgtgctgctggtttcagtttgccagtattttattgaggatttttacatcgatgttcatgagggatattggcctgaaatttttgttgcggttgtgtctttgcgaggttttggtatcattatgatggtgacctcataaaatgaattagggaggagtccctccttttcaattgtttagaatagtttaagaagaaatgttaccagctgctctttatgcttctggtaaaattcggctgtgaatccatctggttctgagcgtttttttattggtaggctattaattactgcctcaatttcagaactttttattggtctattcagggattcaacttcttcctggcttagtcttgggaaagtgtatgtgtccagaaatttatccatttcttctatattttctagttgatttgtgtggagatgtctatagtattctctcatggtagtttttatttctgtggaatcagtggtgatatcctgtttatcattttttaatgtgtctatttgtttcttctttcttttcttctttattaatctagctagtggtccgtctcttttgttaatcttttcaaaaaaccagctagtggagtcattgattttgaacagtttttcttgtctctatctccttcagttctgctctgatcttagttgtttctttccttcagctagtttttgaatttgtttcctcttgattctctagttgttttaattgtgatgttagggtgtcgatttcagatcattccagctttctgttgtgggcatttagtgctagcatatcccctcttaaaactgctttagctgtgtccaagagattctggtacattgtctctttgttctcatttgtttcaaaaaaaacttaatttctctcttaattttgtcatttactcagtagtcgttcaggagcaggttgttcaatttccatgtatttatgtggttttgagtgagtttcttaatcctgagttctgatttgattgcactgtggtctgagagacagtttgttatggttgccattttttccatttgttgaggagtgttttgcttccaattatgtggtcaattttagaatatgtgctatgtggcatggagaagaatgtatattctgttcttctggcatggagagttctgtagttgtctattaggtccgcttagtccagagctgatttcaaatcctgaatatccttgttaattttctgtctcattgatctgtctaatattggcagtggggtgttaaaacttcccagtgttattgtgtgggagtctacgtctctttataggtctgtaagaacttgttttatgaatctcagtgctcctctgttgggtaggtatatatataggatagttagctcttcttgttgcattgatccctttacctttatgtagtgcccttctttgtcttttttcatcttggtttaaagtctgttttacaagaaactaggattgaaaccttgctttttttgttgttgttgttgctttttttgctttccatttgccatttctccttccctttattttaagcctatgtgtgtctttgcatgtgagatgtgtctcctgaatatagcacaccaaagattcttgactgtttaaccaatttgccaggctctgtctcttaattgaggtatttagcccacttatatttatggttaatattgttatgtgtgaatttgatcctgttatcatgatgctagctggttattttgcacattcgttgatgcagttttttcatagtatcgattggtctttatattttggtgtggttttgcagtggtgaaccatattttcctttccatatttagtgtttccttcaggagattttgtaaggcatgcctggtggtgacataatccctcagcatttgcttgtctgtgaaggactttatttcccctttgcttttgaagattagtttggctggatatgaaattctgagttgaaaattattttatttaagaatgttgaatattggcccccactctcttctggcttctagagtttctgcaaagagatctgctgttagtctgatgggcctccatttgtaggtaacctgacttctctctctgtctgcccttaacattatttccttcatttcaaccttggagagtctggcgattatgtgtcttggagttgctcttctcgaggagtatcttagtgatgttctctgtatttcctgaatttgaatgttggcctgtcttgctaggttgaggaagttctcctggataatatcctaaagtttgttttctagcttggatccattcttcccgtcactttgaggtataccaatcaatcgtaggtttggtcttttcacatagtcccatataacttaaaggcattgtttagctccatcaggccatttatgtttctctctaagctggttattctagttagcagttcccataaccttttatcaagatacttagcttctttgcattgtgttagaacatacttctttagctcagaggagtttattattacccaccttctgaagactacttctgtcaattcttcaatctcattctccatccagttttgtgtcattactggagaggtgttgtgatcatttggaggagaaaaggcattcttgtttctggaatttttggcatttttgtgctgttttttcctcatcttcatggatttatctactttcaatctttggggctgatgacatttggatggggttttttttgggtgggtcctttctgttgatgttgatgttgttgctttctgcttgttagtttttcttctaacagcaaggttcttctgcaggtccagtgcagtttgctggagttccaatccagaccctgttcacctgggtgtcaccagtaaaggctgcagaacagcaaagattgctgccttctccttcttctggaaacttcatcccaggaggatacccgcccaatgccaactggagcccttttgtatgaggtgtctgtcaacccctgttaggaggtttctcccagtcaggagtcacggggaacccacttgaggagacagtctgtctcttagcagagctggtgcactgtgctggcagaatccctctagtcaaaatcagctgctctcttcagagccagcaggcaggaatgatgaaatccactgaagctgcacccacagcctccccttcccccatgtgctctgtcccagggagatagaggttttctgtgtaagcctctgactagggctgttacctttccttcaaatatgacctgcccaatgaggaggactctaaagaagcagtctgccacagccactttgctgcacccaacccggaccttccagcctccttggcaccgtcaggggaaaactgtctactaaagcctcagtaatggtggactccactccctccaactgacctcaattggcccaggtcaacttcagactgctgtgctggcagcgagaatttcaggatgaggaacgcattagctgtttgtgattttcatgtctgttgcagggatttgacccattgttagtgctagatttggagtcttaaaaaacagatttatcttactgaactcaaagtacaacttgaagatgtactcagctgtttacttaaattaaagcgggagaaaatgtatctttgcagatctatttttatgtcacttgcttttagacacgagattgtctctggcacagtaattcaacttagtctatgtcaaaaacatagcctgaaaatgctcaaaaaaaattatgaatagcggattgtattctatgtgttctcaaatttcttctatgatgtaaaatatataacataatgttttaccttggatttctaacctcagccctcagccattttcccaattttttttttttttgttttgagacggagtcttgctctgtctctcaggctggagtgcagtggagctatctcggctcactgcaagctccacctcccgtgttcatgccattctcctgcctcagcctcccaagtagctgggactacaggcacctgccaccacgcccgactacttttttgtatttttagtagagacagggtttcaccgtattatccaggatggtctggatctcctgacctcatgattcacccatctcagcctcccaaagtgctgggattacaggcatgagccaccttgccatgccccactttcccaaactattaaaagaccttccaaggtgggtcaaaagcatttttcagagaagattattcctaacagtaaaggataataacagatggataaaaatctcaaataaattatgcctctatttgcagaagcgtcactctccagagtctccaagatccagagaatttccatgaggtagagtagtttatggacatttagcaaagttggtcctgactgctgtctcagcctcttaatagatgtgcagctatagacaatttactggacttagaacagttatataaacctgggctgcaagaaaacggataacactgattgcaagaatggcaaccacttctcattcctctctgatctgggccctctgcaatgtacacttgaggctgcttccatggagggaaagattttcttttcccaaatcttggatctggctggccttatttgctctgcctcattcatactttttgttctaataaaataattaagatgtttagcgtctcatcccagcctttatcttgttaaaactatatcttatgatatgtcatctctctttactatatttggttatattcattctattcaatactcaggtaattttttatctctgtttaatttagtgtttcacctataccttgtcctaatttttttattctttacattctaccgagctgtgattcaaatatgatatttgaatatggaaaatggtggcctagtttttcttcagaaatgtctttttatttacttgtgttctttagtttttaacttggttccaatatttgggaaatatcacatttgagatgtctgtagtcatgttatttctgtgcttattccattttcccttggaggaaggtggacagcatacagacttgacatccttgtgatctatcagtatctgaagggaccactttttttcagtttgattacttctctggcttattctcttgatttactttagctttcatcaagtgcttctatatttttaaactgtattcattattttcatagttcttgtagcttcttgagaacttttacttgtctacactaaaatatttaaaaatatgtagccttttcttctgaaagcacaaatatgcagtgtacacatgagtagaatatttcataggcattgggcagcatacaaccacatcttatgagatattccgtttcttcattcaaaacatctctctcaaatatgtagtaatagtcacttgtaaggggtagttcttttgatacttaaaattttcttttatgtgcctttatgaaaatatatacttaactacagagaacagaactctgtgcttccttttagtatgtccttgacctcacaaaaataattcatgaaatcttatatttattttataaattaatttaatgaaacaaaatttgtgcatggctaaatattacttgttgagtacaatttagaatttctactgtcattttagtgtcctaaaagatatgagctgttgaatttctgctctcataaaatgaatgatattgttaggcctaaacccttgccatttattttccccctctgtcatacagtgtgtatctttggttcactgctgaaaaattttattaatttttctctcttgctagtagtcatactttctaataaagttatcattacttgtgtttatttagttactgtatgttaaacatttgatttctgatggtcttaatgtcatttaatataattgtaaatatttcaatttgtcattattaacaaatttctgtattatatgttttagactcagctattaagtatatgtgggtaaatgacttagaataatttctaaaacattgtaggggctactaagtactaataaccctgattcattaaatttttattccttataatattctttattgactaaattattttgtaatcttatttaaatttattcttttcttttctaaatatttgtgaaaaaggggttaggctaatgtgtcattttgataaaacttcatgtcaaatgatatgtttcactggtttcttttagatgtaatagcttttttgactcaggcaatacatgcaagtatgaagtataaaaattatagtctcaatccttaagctgagtaaaaacttggctatttattgattttaacaaagctacattatcccacataatacgtaaaactttcacaaagctacattatcccacataacaggcataccagctgcctatatctggaaacatggattgttacaaattagaagtaaataacttgataggcccaatttaacaaatgaagctcaagaagtgggagatatgagacctataatgaaagattaaattattttaaaaatcttaccacaaagaaaaatcagagtcaaatactttaactgttaaattatacaaaatatttcataaaaataccaatcctttacaaatacacaccatacatagataagagataaacaacccctaactactttatgaggccaatattactataccaaagccagacaaacccatcatgtgttaggattaatatgggtacatacggctgataaataaagacacataattctcaaaaagtactaataagttaaatacagaaacacgtaaaagtaattatacaccatggccaagtacaatctttttacaaatgaagtggcttaatatctaaaaaccaataatttaatacacaacattgataaagtgaagaacataaaatgatccttttaatagacacagaaaagcttgtgatacaaacaacactgattcattataaaatccttaacatactaggaaggaaaaacttactggaactactaaaaaggattcataaaaatttcccactaatattacacttgctgatgaaagactaggctctttgcctcacagttgtgggaaacagataagcatggctactttcgctactctactaaattgaactaaaggtgttaggcagagaaattatataataaaaacaaataaaacttctaaatttataaaataaacttttattgtaaatggcatcaacttatattcaagaatttttaaagagtttacaaaaatcaactggaactaataaatgagttcagcaggtcacaagatacaagataaatgcacaatattaaattgcacttttatacagtaactaagggcaatcagtaaataaaattagaaaaaataattctactcattagctcaatgtgtagtggcttaaaattccaaatatgcattatgtcttattttctgttggctacaaatactgacacagcttagttgaatgggtctaccacaatgtcctcatgtgtccggaattggtcggttcttggtctcactgacttcaagaatgaagccgcggaccctcacggtgagtgttacagttcttaaaggcagcgtgcctggagtttttcccttctaatgtcagcatgtgtttggagtttctttcttctggtgggttcgtggtctttctggctcaggagtgaagctgcagacctttgtggtgagtgttacagctcataaaggcagtgtggacgcaaagagtgagcagcagcaggatttattgcaaagagcgaaagaacaaagcttccacagtgtggatggggacccgagagggttgccactgctggctcgggcagctgcttttattctcttatctggccccacccacatcctgctgattggtccattttacagggagccaattggtctgttttacagagagctgattggtcccttttcacagggtgctgattgatgcatttacaatccttgagctagacacaaagttcaccacgtctctactagattagctagatacagagtgttgattggtgtatttacaaaccctgagctagacacggggtgctcatttgtgtgtttataaaccttgagctagatacaaagtgtcgattggtgtatttacaatcccttatctagacataaagtttctccaagtccccaccagactcaggagcccagctggcttcacccagtggatcccgcaccagggccgcaggtggagctgcctgcctgccagtcacacgctgtgctcccgaactcctcagcccttgggttgtcgatgggactgggtgccatggaacagggggtggagctcgttggggaggctcgggccgcacaggagcccttggcaggagtgggggagaggctcaggcaaggtgggctgcagttcccgagccctgccccgtggggaggcagctaaggcctggcgagaagtcgagcacagcagctgctggcccaggtgctaagcccctcactgcctggggctggcggggccagctggccgctccaagtgcggggccgccaagcccacgcccacccggaactcgcgctggcccggaagcaccgcgggcagccgcggttcctgcccgctccccgcaagataagggagccggctccggcattggcctgctgagaaaggggctcccacagtgcagcggtgagctgaagggctcctcaagcgcggccagagtgggcaccaaggctgaggaggcaccaagagtgagcgagggctgtgagggctgccagcatgctgtcacctctcactcatgagactgaagctgtgtctcaactgaagcttgactgggaaggatgcacttctgagctcaatctggttagttgtgcattattgttttgactcagttcttagtttctttctgtctttggtcagggcactctctctattctctgtcacacaagcctgtaaaaatgaaagcttaaaacactgaagctcgcttctccagagcaaagtatgcgacagacagagagaaagacaggaaaaaaggaagtaaacaatatcacaagagagagaaagtaagaagcaagtgacaatcttttcataatcaaatattggcagtgacattccctattttccaatgtattctactgccatgaagtgagtcactaaccacttactgtttacatttgggtgtgtatagttggaaataaaaattattatgagccatcatgaaggctgtgcactacgtatgccaaggtgagacaaatgggcctgattctaaatataacgagaaggtactacaatgtgtgttgttgttattgttgttgttctggccaaagaataacaacatctaaattttattcaatttcaatgttttcatggtggagtttgaaaaataaattcaagaggggacatgactttctcaagattcaagttataaaacccaggcatgtttgagagatattcaagcaatgtcccatcccttgtagtttctttctctaagtttatgcagtagctgtgtttaatatcaaacccaacagtcatgcgtatcattttatacatatctcatgagatcccttgcagctggatgccaccataatccccactgtgcaggctgtgagactatggagcccctgagaggcacaatgacatacttggcatcacataattaatacattaaacataaagactttaactcagcttgtatcctcaaacttgtggctctggctgcattccatttcctccggcactggtgcaggaggtgctgtatttgcataattgtgcacaagtaatcagatgacttgggagagaatggtgagcagtcagcagtgcagaaaagcctttgagtaggtcttattgaaggaagataggtcttattgaaagaagaataataccttcaagaagtgacctcatttctttggtgaaaggtcctaacagtactaagtattctggtaaccaaaaactcacattctaaagacagtccaccatgcagcactgttggccagaatctctcaagagagaaagatgttctgctgtataacaactttctgaggctctttcttgtgaggttctgttcctcacaagtagcaccttctagctatgtcttcacacgacagaaggggcatgaatattcctttcaacctccgtcacacgggcactattattttctcgttaacatgcagccctcctgacttaataactttctcaaagttccaataactaatagtatcacactgaatccacgtgtggattaagtttttaaatatgaatgtggagagtgaggaacacaaatatccagaccatagcaaaaagttaataagcaataacaattgcagtggacagtattattaatgcttgggatatgggaatttgatgtttctatcacaaaggttaaacaatggtttatccttggccgggcatgatggctcaagcctgtaatccaagcactttgggatgtcaaggcaggcggatcacaaggtcaggagatcgagaccatcctggctaatacggtgaaaccccgtctctactaaaagtccaaaaacattgctgggtgtggtggcgggcgcctgtagtccccgctactagggaagctgaggcaggaaaaaggtgtgaacccaggaggtggagctttcagtgagctgagatcacaccagtgcactacagcctcggagacacagcaagactccatcaaaaaaataaaattaaattaaaacatataacaaaattaaggtccaattaaaggtaaatatatatagcaaaaaaaaaattcaagctctgataaggttaattgtaacagattgtgccagaattttgagatttctggagatggacagagcccaagagtttccttctataacaatttctgtgaagtttcttacactcttattcaatttgaacgtggataaatgggttttctctgttttgttatttaagagattcatgataaggaaggcctatttatgcatgattcttaaacaattattgagtcagtggtgtctgctgaggaagggcacagaatctcatgcccacagaagcatgatgttctgtcagataggagacttctcccagagccagaacttcatctttcaaatggaattagagattttcacaggcatacattgctctgaagccctatcagaggcttagcactgagaatatgaccaaagaaggtgactaataaacatatgacctagtactctgatctacagtgattctaccctctcaaatagctcttccctggctctggaatcttttctggattcatctaccagaaacagatacactgaaagattgagaagaagcttttattctcactgtgagtcttgccctgtctcaccatcttctctagaagtgcaatgttctaactattcctgagagacttcatctcaggtagctctctctgacaacataattgagaagagaaacgagcaagactcagattattttgaaggcttgtctagggttcttacatgatttatgtctccaatttatgtcaatattgacaaatatagattcatctctagatggtagaaaaacagaaggaggagcctctgctcacagagaaaataaaagatgaattcaatgttttgtagagccagcttattttaaaccatggggcatttaatctttttagaaaaaaacaaaagcaatagggttttttgtttttgtttttgcttttgcttttgtgttttcgttttggtttttttttgtttgtttgttttttccctgaagcaactcaactgtggcctcagacaactgggcactgagaacgcatgctcctcactagaatttcattactacattgcagagaaatgggataattacaaaggatttttttttttttgagatggagtcttcctctgtcatccaagatggagtgcagtggcatcatctcagctcacagcaaccttggtctctcaggttgaagcaattctcctgcctcagcctcccaaatagctgggactacaggcatgtgccaccttgcctgggtaatttttatatttttagtacagactgggttccaccatgttggccagatggtctcgatttcctgacctcgttatccaccctccttggtcacctaaagtgctgggtgtgagctgctgtgcccagcccaaaggattcttaagggtgatatgggggatggaatggaaaaaataaacttagtctttgcacttccacctggtctaactaaccctactctcatcctatcccaaaattattgccagacttttctggagtgtgccaggggcaattcagaaggaaaagaggttattcatgcctatccatttcccatagctcctgagatctaagtcgttcactcccctggtttcaggttgttgctccccttctatatcctcagaattaatgtgatccattccaatacttataattgtacctttatctgatcccctcctattttgctgtagacattttatgtagtagatccagttgtaatagagacaagaatgtttatatacaccataatcagaactaaattggagttccataaccccttttttgactgggctgctactcagaaatcatacaaaccaggctgcctggaggttgcagttaggagaaatcacatcttgcccaggaatgtcagtgtggaaactcagatttggaaaatagattcctatagccccaatcattttgcaacacttctgcagagttaaaagaaagccagtatctaacagaaaatcttgagcttgcagaataacagaaaagaaaaaaaaaacaaaaacacaacttgccaaaacactgaaactccctctacttatgaaataaacaaactggcttaaattggtggaatcattatggccaaatggtgttttggcagaatcaccttgctgaggtcaccgtctgaattttcactgcctgtttcatcacaactccccttcagtttgcccatgacatccatgaggaggcaatgagcttgagagtaacgtttcagtataaaattgctttctcttaaaaacctgatgtcatagtattggcttctagcacttcaagaagtgagctccttttactcaataacaatgttatctatatcttagagacagtcaacaggagataatctcttctgggaccaaagaaggtgactaataaaccatttaatcaacacattacctaaccaaaagctgtggaccctgatgaggaaaataagttaaaatgagactattggctcattttaatagatatggtgataaaagcaaaaaaaaaaaaaaaaaaagagagaatttaagcggtctcaaatacctaaaagatgacatggattagcttcaagtaacacataatgtggctggagtcagctgatctttatgctgaaagtgtcaacagtagtgacaaatacttcaagtaacgggtcaaaagtctaagacagtcattctgccagaaatggtctgggacttccccatacatgggacacgtagatcaactttctccaagaaccaccaacctggcatgcagtgatgacctctgcagtagacagggatttaggcttgattgttgttcatctctttggagacataaccctaattgtgaacttctaaattaatggcctgacaattagatcagcagctaagataaatttcagtttgcagccccaaagaagatgttcttaattagacagttaatcattttcaatatggaagcctaaacacgtagaatgtggcaataacccggaactctcagttctgacaattgagtgaagtaatcaccccagattcaggttcctcattggctgacaatgagatcaaacacccacaccagcccagtgaacaccatgaggtgtcatcttccctggcccattagtgaaccaggaacagatatttagaaaatattcagtaaattggggagtcccacagagtcagaaagtttgcttgagatagtagagggtggcataaaatttctaccgaatatgaattttaatttttactttagtgccgtttctattttagtctaatttccttctagaatatgttatttctatttaccaagtggcctcctgtggtctttttcatagagttcaaatcgacccatctaaaaacagaaagatcaagctaacgacctccctcaggggtcagaattcagtttcacagctctgtagcaagctcattgttgacttacaaattagtgtaaccaatagtaacgtcatggtgaccataactccaacatcccaaaaagtacctcaagttagaggctgacttcatttatcagaggattcaaatggcaaaatcaagctttactagatcactggattactggaagaagtgagcaatgcgaatctgcaatatagtttcactaaactttaataggacagcaagactgtagatattttagccctctcaaaatatgaatcttctgatcctttcatctagaatctctatgtgtgccataaagtcctaactctgcttgtgcctatactttctgttcatgcagagattaaaagacaaacaggtgggagcttagtgttttagcgtttttcctgagaatctgtctagcctagagcatccccatttttttctagattccaaggagtactatcactatcctaattctcagtgtcttgtttccaagtatttcctcctacgattgtcagcgtgactacctttttaccccactgatagtgtttgctccaggtgaactgggtagttcatttttatttaaatgcttccataagcgttaagctattaatttaagatttctttgttttttataaagtaattctgctgtttccctcagagctcaactttcactaagtctcataaattttattatgttttgtctaaatgtctatttatgttaaaatattctctgacactatttgtacattttttattcattaattatttaagattgtgtcatttaatgcacacatgtttgcatttcccaaatttcttgcttttttggtctctaattttctcttttgtgattagaaaacattcattttattatttcaatctttcaattttattgattttttttatgatgcagcatattctccattctagagaatgttctatgtgcatttgggaagaatatacattctgatttggggtgaagagttctccatatatctctagttttatttggtttatgttattcatgtcttctatttccttgtttctcttatgtctagttcttctacccaatagtgtaagtggggaagtgaagcttgcaatttttattgttgaaactattgttgcaactatttctgcctttatttctatcagttttgctttatgtacttctgtgaacttttgttacattcatatatgttaatttattttcctcatgaatttatccttctaattataatctatcttcatctctagtaatagtatttgttgtcttaaagtatatcctaatttttttatttttggtttttctgggtgcatagtaggtgtatacctttatgaagtatatagaatattttgataccgtcatacaatgtgtaataattacatcagagtcaatggggtattcatcacatgaagtattactattggatttcaaataaccaaattatacaatttctgttattttaaaatgtacacttaaattattcttaactagagtcaccttgtgctgtcaaatgctagaactgattcattctttctaactatatttttatacccattaaccattcccacctccccgccctcaaccttctactacttctctcagcctctggagaccatcattctactctttatctccattaattctttggttttaatttttagctttaacaaataagtgagaacgtgtgaagtttgtctttctatacctggcttatttcacttaataaaatgaccttcagtttaacccatgtttttacaaatgacagaatctcattcatttttatgtctgaatagtactacattgtgtatatgtaccacttttttgtttattcatctgtcgataaacacctatgttacttccaaatcttggctattgtgaatagtgttgcagtaaacacaggagtacagctatcacttcaatacacagatttttctctcttttggatatatacctaacagtgaaattgctggattgtacagaagctctatttttagttttctgatgaaccttcaagctgttctccatagtggttccaccaacttacattcccaccaacagcatatgagggttcccttttctccgcatgcttgtcagcatttgttattgccttttagctaaaacccactttaactggggtgaggtaatagctcattgtaattttgatttgcatttctctgatgattcatgatgttgatcatcttttcatatacctatttgccatttgcgtgtctttattggagtaatgtctgtttacatattttgcctattttttaaaataggattattagattttattttctatagagttatttgagcgccttctatgttttggttacaaatccattttcagataggtagtttgaaaatattttctttcattctgtgggttgttttctgactttgttgattcttttctgtgccatgcaaaattttataacttggtgtgataccaattttccattttgctttggttgcctgtgcttgtgaggtgttactcaagaaatctttgcttaatccaaggttttttagaatttccccaatgttttctttcagaagtttcatagtttgcagttttacatttaaatatttaatccattttgatttagtttttgcacatggcaaaagatagaggtctagttttattcctctgcatatggatatccagatttaccatcactgtttattgaagagactgagtttttattcttaatatattttcttggtgcctatgtaaaaaatgagttcactgtagatggatggtttggttctgggttctctattctgctccattttcctgtgtgtctgtttttatgccagtactatgctgttttggttactacacatcggtagtataattttgtgtaatgtaataatgtatgctatgtaatgggattcctccagttttattctttttgctcaggatagctttagctattctaggtcttttgtgattatatataaatttaagattttttagagctgttgtatttatttgtgtgaggaatgtcaatggtatttttacagaaattgcgttgaatctgtagcttgctttgtgtagcatggacattttaatattgattcttccaatccataaacacagaacactgactaatacaatctgcaaatgggtagtttgacttcctctcctcttatttgaatgcctttatttttttctcttgtctgattgctctggccaggattttcaatactatgttgaacagggctggtaagagagggcatctttgtcttgtgccagtttccaagaaaaatgcttccagtttcacccattcagtataaagttggctgtgggtttgtcatagatgacttttattatttcaaagcatgtttcctcaatacctagtatatggagagttttaacataaagtggttttgaattttaatgaaagctctttctgcatctattacaataatcatgaggtttttgtctttcgttctgtttgtattatgaatcacatttattgatttgcatatgttgaaccaaccttgcatcccagggaaaaagcctacttgattgtggtggataggctttttggtgtgctgctggatttggtttgccagtattttatggagaatttttgcatcaatattcatcaaagatatgaaatttttctttcttttgcttttcttccaggttttgatatcagaagggtgctggcctcataggatgagtgaggaagatgatcctcctcaaatttttgggagtttcagtaggaatgataccaaattcttctttgcatatccagtagaatttggctgggaattcgtcttttcctgggctttttaaaattgatagtctatttattacagattcaattttggagcatgttattggtctgttcagggattcaatttcttcctggttcagtcttggaaaggtgtacatgtccaggaatttatctatttgttctaggtgttgtagtttttttgcataaaggtgttcatcatattctccgatgtttatttctatttctgaggagccagtggtaatatcccctttgttgtttctgattgtctttgtttggatcttctctcttttcctctatattagtctagctagtagtccacatttaaaacaaaacctactcctggattcattaatcttttagtttctttgtgtgtgtcctaatctcagtttatctctgattttggttatttctgtcttcttccagctttggggttggatagctcttcattctctagatgttttagttgtgatattgagtggttaaattgagatctttgttactttttgtggtgggtgttcagcaacatcagtttttttctcaacactgatttagttgcatctcagggattctggtaggttgtgtctttgttctcattactttcaaataactttttgattgatgccttaatttcattattcacacaaaagtcattcaggagtgagttatttaatttttatgtaatcatatggtattgagtattggttttctcaacttttacctccaattttactgtactctggtctcggagagtggttgtcataatttgaattcttttataatttctgagaacagttttatgtcgattaagtggttgattttagagtatgtgccatgtggcaatgagaacgtatatgttgttgtttttggtggagagttctgaaagtgtctgttacatccatttgatccagtgctgcattcagatcttgaatatcttgttaattttctgccttaataatctaatattgtcaatgggttgttgaagtttttcactataattgtgtaggaatctaagtctttttaaagacctctaagaacttgctttatgaatttgggtgttcctgtgttgggtgtgtatatatttaaaatgtatatatttaaatatgaatacatatattcttgttgaatttaaccctttagcattttgtaatgcctttttgcctttttaaatctttgttgttttaaagtctgtttgtctaaacttagggttgcaacccattctttctgctgttttccatttgcttggtagatttttatcccgtcattttcagcctatgaaactgattgcatgtgaaatgagtcttgatgacagcatatcattggttctttgttctttatccagtttcccactgtttgccttttaattggaacattcagcccatttacattcatagttagtgttgatatgtgtgcatttgatgctgccattataatggtagctgcttattatgcagacttgtttgtgcgcaactggtctgtatacctcagtgtgtttttttagtggctaataaaggtttttttcacctatatttagttcttccttcaggagctcttgtaaggcatgtcttgtagtaatgaatttcctcagcatttgcctgtttaaaaagaactttatttctcctttacttatgaagcttagtttggccaaatacgagattgttgattggaatttattttcttcaaggaggttaaatattggtattggtctcttctggcttgtaggatttctgctaaaaggcgtacttttacactgataatctttcctttgtggttgacctccctttcctctctagctgcatttgacattttttcttttatttcatgcttgaacaatctgataactatgtgttttggtgattattatattatgaagtatcttactggagttttctgcatttcctaaatttgaatgctggcctctctagccagcattccccaggttggggaagttctcatgaatgatatcctaaaatatgtttttcaaatggcttccattctccccacctgtttcatgaacaccagtgggtcatacctttggtctctttacataatcttatatttttcagaggcttgggggtttttattactcttttttatttctgtctgtatgtcttacttcacataaacagtcttcaaactctgagattcttccttagctttgtctattctactattaatagttgtgaatttcttataaaaaaatttagtgtgatttttttagctctctcaggttagttatgctcttaatactggctcttttgtctctcagctcctgtatcatttcattatgattcttaacgtttttgaattgagtttcaagttacttctgcattttaatgatctttatttctattcatattctgaatttgatttctgtaattttagctatcttggactgatttataaccttactggagaggtactgtgaccatttgaaggaaaagaggaactcaggttttttgagttgtcagaggttttgtgcttgttctttcttatctttctggggtgatatttctttaatatttgaagttgtcaacttttggatttttccttttattctgcttgatgaccttaagggtttaattgtgttataaggttggctcagtcaagtggttttgtgtgtattcatgcaggcgaaggtggctgctcagggctgaggagagtatgctgttttttgtgcttagttgtactcaaatgacagtgttgacaaaggagcagggtgctggtgttgtggggcagatggcctctgtttcccccaagattctgtctgcagtggtggtatagcaggagagggggcctggagtacactcctaccaacagcagtgccagggcagaatgcatatgcacatgtgcactgacaggacagggaaagcaagatccttccatgcacacacacacacacacacacacacaccagcatagtgatgtgtggggtggcaatgggccttggggggaagctgcagtgaggagaggcagcaggcaggctgatgcctggatggggtcaccccactggagctgtctactagtcagacatgatctgccagttcaggatctatgatgcaggcccccagggtactcaaggctgcactgcaagcatgcagggccgaattggggtcgcaggagaggccagcacaccaacgcaagctcaggtcaaaacagccccatctgatgggccaccaccctgcagactttttgtccaaaatttcccctagggctaacgtctcttatgggagcaagttaagcttattggtgtgggcatccctggacatgcttcactacacatgttcccacaataaaccctcttggctgtgcactggctggtgtgctgcccctgtcacttctctaagcagctcttcctttcaactcattttccatgatggtcagagggtctctgccagtgggattccagaggccagtcaggaaagcaggtagctccttgccacttaaactcacctgtttttctcagagtcactgggggccagaaatcagttccactgtgctttagccctgtgcagggttcccagcttctgaatcttaagttcagatgttgtgtctttcctccatcactatcagtacctgccctcggttaagagtgtgccagtcatcctggtcccttggtgtcagctgttccaccttggtttgtctattcagccatcttgctcaaatacacaaagtcttataaatcaataataaatagacaattgactacttgaaaaatgtgcaaggaatttgaattaaaaatttctacagataagaagcaaaatttgtcattaaatttaaaatatgtgacattattagtttagagaaatgcaaatcaaaagctcaatgacatacttactagaagacctgtaaaaggcaataaaaaaggttgccaaagatatcaaaaatatgaaagcctcacacattgtatgtgggagtgtaaaaaacaaccgatttaaagaacaatttggcaattattcaaaatgctataaatagtatcaccatatgactgagacattttactctgttacgtactcaaaagaaatgaaaacctatgactacacaaagaatcagatgtaaatgatcaaaggagcagtatttgtaatagcccaaaggggataaaaccaaaatatccatcaaataataacagaaaaaataacgtgtggtgtgtccatacaataaaatactatgtgccaaacaaagaaaatgaagtaataatacctgctatgtcaggaaaaaacctcaaaatcactaaagtaagtaaaataaaccaaatgcaaaagggcagataatttatgatttcacttaaaataacttttaataaaaggcttatatataaaaacaggctaatgattgcctatgaccagggtaatgaaatcagtaagtacaaaagagattaatttctttttccatagtgataaggtgatttcaaaattagattgtggttatgggtgtctgtaaatacactttaagaacttggaattgtacacttaaaacatgtgatggttttgttataagattatatccctctaaaatgtttccaaatgaaactgttgacttttggagaactaagtcacagactgtaaaaccaaacccatttattgttcatctcaaggcatgttaaataaagaggaaaagacaaagatatagttataacattaaaatcttcatggcaaatagttataagaaaaaaattacaattgtaaaatgtattaatagacataaattacctgcttagatttaccaggccagaaatgtaaattaaataatagtacactattgaagaccactctgagtcactgattattagaaacttgttatgatgtcatcataaggttaaaatattccttatcaaaaatgactcacagcaaaaatgttaaataaagtgtgttagtggcacccctgtccacagttgctggtacttttagtgtatggccaattagaaagctgctcttttgtccctcatttgtaaccaatttcaacactcaaattcaatattgaactcctaaatttattgataaaacatgtgagaagatgtttaaattatatatttaaaagatattatgaaaataaaaaatcttagcaaacatagggagaattataaactaacatttatcatacatacccaccacaaggcttcagcaattctcacattttttatctttcatttttaattatcaacttcaattattctggtaatattttcaagtaagcatattatgttgtcagtttgtagaaatttgagtacctatatctaagaaataaaaagaaaaataaaaatagtactataaaatctaagtaaatacaagtattttctaatattgtactaaagagtttcttgattctttacgtgcaaaacagtagaacttagcaacctccaagactttatgagaaataacaatttaagactaatatttatcctggagactcaaagtgactataaataaatatatctttagttaataaagcttaaaaataaagtattaataaaaacacattttgaagatggctgacacctttgttactagacatggggcttgtgctgtaaataactagtttaaaagtccatggaaaagggattttcaaccaaaaagtctatagaaaacaaaaaattttggtttttctgaactcaggatgtgaggccagcttttaaagcactgaatttaaaaagccctcaagaccctaagcttgataagcacgtcaccagcaggtctcatttttcagctctgtgcaccaggtggcatgtctagcaaaatgtcccctctcatgtcaggttttttctatgaactcagaatgaccactgtcccttagtatgcagccctgcagtggacccaaaaatgacaatcaatcaggtccagagttgctcattatggcctttccagaatgtaattatctaaggacaattctcccccttgtaaaattaagaaagtatcagaatatttgcctaatttttgataacatcatactgtgagccacaaaaaagcaagaatttaaaatgtaagggattatctggatcctagggcacagaaatacacctcaaatagaatagtttcacacacgattttatatgtggacttcctgtgtggaagaaaagaatgtgggggtcaatagtagagaagtctgtatgtagtggaattttaagaaatcagagaggccgatggggttcaggagggtatttattaattatttaggtgcactggtccagtggattaacatccaaagaatgagtcctgaacaaagagttaagttaccttttaagcatttcatgggtggggagagatttgtgcagggagaatcatactacagaagcaagaaacaaagacagttattcaattgagacatgcattacattatttcttacttttcaaggaaaaacctgttttgtgacttgaatttatctgtctagtgaccttgcagcttcacagcttgggaaacagggtcttcacaatccctgggaaaggaggagagataaggatcactagccacagaaaaacaggcagttagtttttaaaggactccagctcttactctttctcaacagaagttgggttttcttacacacaagtgagtttctgcttacacactctttaatctcttataattcctgttccattctccccattggtgctttttataacagaggtgttaatagaaagcaccattatttgccaagtcttcatggagctgagctttttcttcttctggcggtggctgatatctggttaatgcatcaactgtacagactgtacagtagtgttttgggctaccattgcctccatagttgactgaatactcctaataaacagagacaaaaggcaagggaggataaggcagatgcaaagaataagcaagaacctactaatgagggtttagaatttttcaaatgctgagaaccatcctccaaacaaggaatccggggactacctggatcaagtctgaagtggaacctgggccaacttgtgcattctagctgtaatttttatgaccactaatattgatttcttggctattgatttctaggcaacagttggttaaattaaattttctacatattcctccttcggaggataagagataatttaaagccagcctattttgatatatagcatttcctttttgtgttgcttgtattgccaataaatctagtgccctcgatatttcattggttatgatttgaaggactgcctgcaacttcatgatgcggctgaggatatagattatggtgcagtaccctcatgacctgtcttgcacctaggtagctggcccatagcatgtcatgattctttcaggaggtcatttattatctttttagtctcctgtgtccacatcttttttgatatttttgttacttttgtgattatgctttttctagttcttcttttatttttattataaactggatattctaagaatttcccttgctttagaggaattagaaagaaggatggcttgattgcttttaacagacatgtccctgcccattttgctggcagttgccaatatgcccatgctccacagatccaatataggccagagggtgcctttcaagcatttgaatcatctacctgatgccaagtgcagcttagagtaaggaatccagagaaagtgtttggatctggtaagtaggagtcattctgggcatttcttcatagagttttgtttttagtctcgtaataatactgttgccctaggaaggttgtttttcctactgcgtctgtgaaagcctttccccatcgagtgatacagtactttccagttatggagatttttaacaatcaaacactggctgaggctgttggttcactggcagggttaagcaaagtgaagttatcttgtggcattaattcctttgcctcccattgccactcattctccatattagtttctctacatacatagcatgaagaaatttttaagctgccatctgtgttttcagctagttgagcaaataagtttttggttgatgggggaacctcgggcactggctgatcaaaatgcttacagaatgacttggtattgaggggttggatgcatttgagtccttatagtatttttgacaattagtagtggaactccaagacctgctccttgtctatcaactggtaatagtgctgtctgtcctgtagaccaaaaaggtagctctggctttaagatagtaaaatttaaaggatcgcatgtccttgtcttacaatctggtttttaggattatgaacatacgtggcatggcagtcatcaaagaagaaataggccctttttagaagggtgggatttctttggtttgagctataagctttccttctgtttctccctctgatataatatttacctcaaaatagaattaatagggtaagagcccaggctcataacatacatatagctgattatttcctcagtcacagactgaataggtggtctggttgtatatgcatattcctaatttgcttcctgtacattcatagtaggtatggtacagtagagttttaactgtggtattttttatccaggtaatgtgtacacagcatggacatccttcaagagatttatcccctttcagtataagcataaatggtaacaacattgttgtatgtaatagaaacatgcttacactacacatgggcacaaaaactttcctctgggcatagacatttgcagcatttgcagtaataacataacaacggaacaatcagtattgacagaattgtaactatggttataaattgtattcacatttacttatctggacatggtcctcttagcttcggctgtgtgtacactagtcagcttccgggatgtgactagagcagagtttgaagaatccttaagcttcagccatgcttagactgaccagcctccagtgtggtcagagcagggcggttgtcctttttaccggtggctgagatttgccatagggctattcgagtggggcaatctgggtcttgttggctaatccacaggttgtcatcacgactcgctactgtcactggttttagatggctatggtgaatccaaggtgtggcacctgcaactttaacagcagtgggagtagacatgattacaatatggcgcctatcgtatatgggtcctagagtggttgaattccattttttacctaaacgaagtccctaggtttgaaagggtgtactgggtctgttagacttataggcatttttttacatacttaaccatgcattttagtatagccatacttaaagcctgcatttgccttcttaaagttagttttcccaatttacagagattaccctgaatctgatttttctggggggtgggcagctgaacaaaatctcagagggcgaatactcagttttttggtgggggtgcacctgactcataagaggaccatgggcaagacctgatattacttcagatgagtttttcgacaaaatttcttcaacagctgcttgagtgtccagtttatgctctccactttacctgagatctgctacctgtaggctgtatgttatttccattttatttttaatagtcgagttaagtcctgaactattttagccacaaatgttggtccattctctgatcttagagttagaggcagcccaaatctgggaacaatgtctcttaacgccttggtcacgtctagtgccctctctgtcctggtgggaaaggccttgagctatcctgaaaaggtgcaaatgaacaccaatatgtactgatagcccccgtctcagggtcattcagtgaagtccattagcagtttttcacagggcatggctcctttttcctgaactcccatgggccgagtaggatcttgtcgtggattgttccgagtgtaagttaaacacagtttacaaatggcccgagtaatagcaatgagccatggcagataaaaatgatgccttaataatgtctttattttttttttaatctgagttcggtggtggaattgttttacaaatctgggggtcaccatttcaggtatggctagcctcccattgaagaatttgtattatcctctttcaatgtagttcttattttcctggggaagccaagctctgttatttggagtgaagattgggatctccaggaggggaatctccgggaggagaggcatagctaaggcatcttctttaggtggagttgtcattgcagccttctttgcctctttgccttcgtatcttttttagcccttagtgttcttgctttttgctgcctcttgcaggacttcactaccgtcacttttggggcccatacagcgtttaagagctgtaggatttcttccttgtactttatttctttgtttccgcagttaaaagtcttctttttttctttgtaaataaccttatgaacatgcaaagtggcagaagcatatttggaacctgtataaatattggtcttttggtcttttgctagccagagaactcttgtcagagctcttagttctgctttctaatcagaagtttctgtagatgaagactgcacctctactgttgagtctaaagtcaccactgcatacacagcttggcgggctccttttagtatgaaactgcttccatcagtagaatattcaatgtttgggtccctgagggactgatctgtcaaatctctctggcttgagaacacttcatctaccacgtccacaccacaatgaaacggtcctcctggcactgactcgatgagagtaaggtagccggatttagggtattcacagtctctaaagttagtttactagcttcctgcaccagtacggcagtggctgctagtgctttaagacaaggaggccatccaagtgcaacagaatctaattgcctggataaatatgccaccaggcgatgccatgaccttatggcttgagtcagaacccctatggcctccctttcacttgtggacatacaagaagaaaagcttgattagttagatctggcagtcctaaagctggggcctgagtcaaggcttctttgatttctttaaaatccttctcctctttggcctcctagaggaggggctccttttttcctcctcttagtggcttggtatgatggcttgaccatgagcaagaaatttgggttgtaaacgcggcagaaccttgctgctcttagaaactctcttacttgacaccgggtggttggagtagaaagtgcacaaacagcctgctttttttcaggactaagccatctttcctcttggcttatataaaagcttaaatattgacacttttagaggagatttgagcttttttctgacactttttattctgccttctacagcaggtgcagtggttcttgggtttcttctgcgtgtagtagcccttggctggtgtgtgtgtgtgattttttggttctgtttttttgggtttttttggtttgttttttgtttcttttactattgccctgatcattttcattatttctttgacatttatgcttccagtgtctttccttttgcaccatgcacattaatctctctctagcctcggctggccttcacactcctgtccagactagcctttttcatgactacgttcacgcccgcgtccatgcctccttgtaaagccagctcctcttcccggaagggctgctgctagtaagttagcctttcttaagcctgtgatcagccttttcctttgcctcctcatctcggttaattaacaccttggttgtcactttaataagctgagtagcattctcgcctacggagcttgtaacttctgcaatttatgcctgatatctccttgggtctgccttacaagtgctggattcaccctgcactgatttttgagtagcctcagggttaaacggagtgtacaataaaaatgcctcacaaagtctttcatagaacttgctgtgcttttatctgcaccctgaagcatgtctgagatttttaaaaatattgattgcctttttcttttaccatcctttagcctttgcagatgggcttctcggcacctttgtaggtgctgaatctggactgcatcatctgggtcctagtgggggtcctcctgtcctcttaagaggcatgagcatatcttatgcacgaccagacctgagacggcctgcctgattttcgctctcatttcaccttctcgggtgagactggcagcatgtatccatttgaacttaactccttagggacagttaccttggtaaagggggtagattggaatgtaaggaggagcggtctctattcttttctgtggttgttacaaaaccggtttttctgccttttctgagattttttcatttgtcttcagctgctggggcagctgattttactttcacttttggctgggaggtgctacaagcctctgtgtctccttttaactctgtagctgccagagcagctgattttctcttgccgtgagctgcgagcattctacagtaaactgctaggcagggctgcattcatttagccatgagtcaatataaagactaggtctgaatgtcctggctgttctctgaccctagtcaccaccttaaaacacacggccaatttttctatagtgcctttggcaagccatctgacactaaaacagggctattctaattcacagtatgtccttaacttttgaacactcagtttcatcctataatcacttctaactctttttttaaaattctttattatgcttttcaaaggagccacttttgatgttttcactctcatttcctctcttgcagttcactttcactctgactttcactcttgagtccaccagacctggtcctattgcgggagtttcagatgctgcttagccaggaccatgccttcccctgtcgcagactgctgcagctgtaaagctggtactatcagccatatgaagcatcttaggtctgattttccccacattcgcctcagagcacacagccaccactaagggatctgtgcctccccatgtcgctgcccacattggcctctcccaatgtaacaggaagagctgcagacaaaaccccttggacactgagttaaagaaagaaggtgtttattcacctgggagcttcagcaagacttctttcccaagagctgaaccgtccgagtgagcaattcctgtcccttttaagggctcacaactctaagggggtccgcatgagagggtcacgatctattgagcaagcagtgggtatgtgactgggggatgcatacactggtaattagaaaggtactgaacaggacagggatcttcacagtgcattttttatgcaaataaccgattaggtcaggggttgacctttaactaccaggcccagggtgtggcgctgggctgtctgcttgtggatttcatttctgccttctagtttttacttcttctttctttggaggcagaaattgggtataagacaatatgagggttggtctcctcccttattttccccctttgagactctcactcattttattagtgggagttctcaccttcttcctcactacctatgtcttcctctatcacagattgatagtgattcatgtagtacactcgtgctgaagcgttctggtgaactagagttgccatgaaaacttttaccacttgaatgagtacagctagtaagcaagagatcagtaagcaggttcctattactactatagtttccattataagagttttaaatccttctagtgccgggaaccattttcaaacatggcctcagtgtcaaatcggtgccacacctgtactggcacatgtgccagtttcatcatgtctttaactatatcttcgactacttgcccctgatcatctatgtgcagacagcaagtgggcctaattacagtcattaaattgggcctaattacagtcacaatcaatttactaaaataaccagacagcaagacaggtttccaaacattggcaaatgtttcagggagaaaaaaatgccccactagagaagcatggttgtatctctgtgtgtacatacacacggggccaggcagttctatgcatgatagtctgggactgtaaaagtgactatgcaaacctttacattctgtcacagaacttacaatttaaagtgagcatctttttctgtgacttagaaattgactttttttttttagttgggagccacttttagcaattttccctttgttgatacataataatagtatatatttgtggtgcatgagtgatattttgatacatgcatgcaatgtacagtgatcaaatcagggtaattagaatatccatcacctcaaacatggatattattttctttgtgtttgaaaaatttcctttgtgttgggagaatttaaagccatctcttctatctattttaaaatatactaaaaattagtgctaactgtagttatcctactgtgctgtcagacactagaaattattcctcctatgataaaaagtttaggctgtatcccatgggtagtaggacaccacatgactgagtggtcatctgggaaattatctggatgactttggaacattcctggttgagccaggtggctgttgcaacaaactgtggggaagcccctcccctaatgccccctaagccagctgtcactacatggcaggaaacctccaaacctgagggccccaggaaacaatgacagtccccactcacatgcaacttgtgctgtgctcagtgccctccacattgagcctgatctagctttacccgagggctgtgaggtgggacaatcagtatccctttattttaaaaggctcagtgaagttttgggcttaatgtgagtgaagtgatcctaaaagctgactctgggatcccggctccaccactgaccagtcctgcaggtggcgagagttgcctctcctcccctcgatttcattttgtcctctgtgaagtgcagccgtgctgatgactcacatatcagggatacatgggaactgtcaatgaacggagtgctctacacagtgcctggagctcagaatgcagatgagggaggagggtgagccataattctgagggaagtcccaacataatttagcccttccatctagtagccgggccccagtacagagtcctatgtcagtgacagggcaaactgagaccagctcaaacacagcctcttcctcagcagcagggcccaactaaggcacttggtgttttggttcatttcctgcagcttcaatgtaaagaatattgtgagacatttgctggaacaactgaaaatcagaagaagaagagacagctcttctccatctccctgagagctcttccccagaatgtgtttatccagagaggaggggaaatatttatttttcgtaaatagtaaatgctagagtcgaatattatatgaaaatctcattctactacaaaatcggagttgtggttgtggttctttttatttcacttgtgtaagcttaaatgagatacagactctaacatttctccttgaattatgaaatcctaaagagtcggcagcataatgtatgaggaagaagagaaaagcagtcatagtttctggctgccggataagacacccaggtccatttttctcagagcatatgttcattttaatattaacccaaggaaagagtgaagatagatcattcgaacttgcagaattaataatttgaaggtattttcacaaagcatagcgacagtcttggaaatatagatttctttaaaaagcagttgcagagatcaggaggatgaatacctttctatgattttacaaaaaataaatcaacttctgcttcacttgctgaggtttcctctaagcaactattaggacattgttgttttttcttccaactctggagttgcatcaggtctatgtggaaaaaaacattataaaataaaatgaccaaagtcaaaaggagaaggccagggaaagtctattgacaatggatgcagggcagaaaggaagctgcattctcaatcttcttctggtgtcctgtgattgagcctttaccttagatgtaaatcctcccagagttttgtctcttaccttagaatttctattctttttttaagttagtttcttatctagaatgaaagaattgtaatgccactttatggctacacctgggccttattctgtaaatatttttactacctatgaggtaaaattcccagcattagggcaattctttatccaattttttctttctgagacagagtcttgctgtgtcacccaggctggagtacattggtaaaatcttggctcactgcgatctccacctcctgggttcaagagattctgctgcctcaggcttctgtgtagctgagattacaggcacccagcttcatgtccagctaatttttgtacgtttagtatgtttagcaaattttgtatttttagtttcactatgtttgtcaggctggtcttgaactcctgacctccaataatctgcccgccttggccttccaaagtgctggaattacaggtgtgaaccaattctttttgaggaataaattacctaaaggtcctcaagcctttctgtcaggcatatcttggccttttctctctgactggggtccgatgaatcacaggtgggcactatttttctatattcccaaccagtgataatccttgcgctctttatttctaattaaaagaaatccaaaatggagatagttatttgagaggtctctaaagacaactaggaggacatgaggagttgaattaatactcatacacacccaggtggaattttacctgttcgaactgggaaaattacagatgtcctaaaaaggcaactgcatttgacttggattgtttatactgagcctgatcacaaacctcctggagagaaagctgtgctgaattaagctgatgattgcctagatacagtctaagctggcaatcaaacattgtccatcatagactgtgctaaaatctttcacttgtgtaaacttgcagtaaaactttataagtccctccctaacctcatctgaatggaacatgatatagcttcttgctaaatttgtgtctcccaaatagcaatttataaaaaatcatgattaaaatgccttttattttattttccacagggtctgttttactcccatgttataaaatgcttttctcaagaaagcatagagcccattctcttctctagagagaatcgcagccttgcaaaagagacaactaaaaatacatacatataagtatcaagaatttaaaactcaaaatattaaatatgttacaaaagtatataagcaatagaataaataggatgaatagcaaaatggataaaatcaactgtgagttgaaagcctgaaagttcaggtgaaggtgttgaaaatgcttcagaaaaaactaaagagataaatatttataaaaataaagagctgggctcagtggctcacacttgaaatttcagctgctagggatgctgaggccagaggatcaattaaggccagaagtttgagacaagcctaagcaagaccttgtcactgaaaatgttttaaaaattattttgacattatagcatgtaactgtggtctcaactacttagaaggctgaggcaggaggattacttgaactcaggaagttgaggttacagtgaactataatcatgctaccgtactccagcctggagtgaggcaaaatctagtcacattaaaataaaataaaacaaaataaaataaaataaaataaaataaaataaaataaaatataatctagtcacgttaaaataaagtacaattatcaaggacaaaaataaaattgtacaacttggcaatagaaaaaaaatagagcatagagcaactgggggaaagggggttgaaagtataatttcctttttatttccttagttggtcattacttagactttttcacttaattaaaattttcttatactttggtgcccagttaaccccagagcatttttaattaattggtttagaggtagatactcatataagctttccactgcaaattacaagagccaaattttaaataaatgttggacctctaaattttctatttgcaatatttaaggaaataaaaattataaaaaacactttgtaaaacatttagtatgtaactgctgtttctaatgtataataaatccaattatggcagagactcactctgttgttgagaatctctccattatatgactgctgcttgtggtgcttaaacctcaggaagaaagaatatatgaatgtctgaacattgctttaaaaagacaatgtacatttaatgtagagatatgtgaccagcttagaaagctgcactttttccacagcaggcaaaccagagcctggataccccagggtcacagctcatgagaacatagggctggactgtgagaaaacaagaagcaattcgtgcagaggagttgacaagacaccaactgggctgagaaaaaagagctgatagattaatttccaaattatactacaaaacatacaataagcagaccccatagctttatacattaaaaccaaatgatgacaaagagtgaggattgcattaaattaaattaggagcaactaaagactggtttatgatcttgaaactttagtcactctccatagttccatcccatgacccggtaattatttcctgctttctgcatgccttggacactggtccatttctggccccaaagtgttcctttttctaataagagtacttacttcatctcttaatacaattcctttccttgcatactgtgccccaaagaagaaatattaaaaactttcctgatgtttttctgctgcggggttaatgggctcagagtgatgataagaacggccaatgagtgtgtggagccagatagtgcttaaaatatggacttcagtccagtgaagtctaacaagattggcacctgagcactcttctctgagacctgaggatggactcactgaacctggagctactaacgcagctgatacccacatatatacaccacctgtgttcctagaaactggccttcccagcccatcacagcaaacaccaacaccagcatggaacgcttgggagtcagaggtttttcttgtcgttgctactgccatcatccatgccataaccactgtccaggggctcaagaagctgcccacccaccttgctcactgctgacacctgagcaaatcacatgaaggccaaataattagtcttcctggacctgttaacactgctgccagcataactgccttgagacccaaaagcaggcatggtaagctcaccactgccaccactgggatccaatgactaaacctctggtgcccctattcccagcaaaactttaccacagcctctgctaaaaacgataccctaagccactgagaaaggtacagacaccactgatactctttacagccaaagaaatcatataaagacaggccgggtattgtggctcatgcctgtaattccagcactttgggaggccaaggccagtggctcgcttgaggctaagagtatgataccaacctggggaacatgtcaaaaccctgactctactaaaaacacacaaatttgctgggcatagtggtaggcacctgtaatcccagctacttgggagactgaggcacgagaatcgcctgaactcagaggtggagcctacagtgagccgagatagtgccactacactccatcctgggcaacagagcaaggttctatcttaaaatatatacacatacagagtttaaagtctgtgctctcctctcctcagctgccttgtgactgtgtaagtgtatgtttgggaagggagggataggatgaggacaggccagcagagagtcaccagcactggctaaaggtctcagaccaaattttatactcttgaccaggagaaacttctctgttattctaatcacattaaactcaagcattttctttttttctttcttttttttgagaaatcacatcgaacttccaaaattataaagttgaaaatatgtaataattgacaattggaaacaagaaagaggattagctataaaaataactcaggacaatgtatttatcatgaaaagatggtcttggtggaagaaagtttcatgcccagccagcccattcttcaatatctgctaaaaaaaaaaagagcaaagggaacttaaagacatcatagacttggaaatttcgtctcacagtgcattaaattcccaaatcacatgtggaagagaagaagctgctgcatattagactaactagttttactgaatgttgtctgttgatttaaaaattaatactcttatcaagagcaaattgaaatactgaaagttatttactaaacagcaaagaatattttcagtatataaaaagatttaaaaaaacgttgacaccttaactaaatctgacacaaatttaaaaggaaaagtaactagaaaatgaaagaagcgttgtacaagtatgcgatgcaccctctgttgcaccaactgctcctgtttgttgagtcccctcttctattctgcctcctccatctccttgctgattcccctttttgtctattttaatttctctctctattcctttctcaggtcaccatgtcacattccttttgtgtcttttgatgtccaatctcaccgacaccaccttcattctctattttatctttacaaatggttaattaggcataaagagggaaaacactcctgggaagatacctgaatcctggtgcacactatcattatcactgtttttcatgttgatgctcatgtgtctctgctttctcgacagactatttaatcagcagacagatcaacaggccaaaatttccaccatagttgcaaatttgaatgcggatgaatggattaaaacacattcaagtcttgcaatgaacggcataatgtatggtggtataattcagagtggttacaggggagagttaaagatcattgtatacaatatcactcgagaatcttttgctgtaaaactgcagatgtgggttcctcaatttttagtggtaccttgtcaacaattaacccctgaggatgtctctgccccaacagaggctacatacagaactgggagattcagacgcactggtacacgtagcttaaatcctggagccaaaatatgagtacagcgtccatcacatcctactcctatggctggtgaacttgtagctatgggagaagaaactgaaggcatagtacagtttcctaaagatgaaaaacaatattatgttcccctctgttttggttattacagagaataacctgtttactaatggtcagtacctgtgtctctgtgtctgatgccaagaataaattcatcatctgcatagccaccactgcaacagaagccaactgcagtcaatgttggctatgcgtggaattgccagaggccaccaaaaatgggctacgttggagaatcgtccctgtaccttactgcataccgaatgttgtgtgtatatccctgacaattctcacactacgactctccttgcacagccatggtgggtgtggttttcattaactgtgcttttaattctcctgtgcttacactgaatctgtaatctgtataaagtatgctttccccaagtatctgtaagggtattttcctacaattgagtatcaaattgaagccaaatttggaagaaaagttaaatactcaattttatctcaattgaacatggacacaaacaatggtcaccaagtcccggaacaggttctgtgagtttcttcaggcgttcatccaccagtgtctcagagaaatttctattttaatctgttcctgtatgttagttattgaaaaacaacagacaatcgccaaaaatttgacatttttgtggtttttgagcccagtagtgaagagtcctcgttacccggccttatgccaaagaactccttacaaaaagagctagggtcccagatggcactagagcttcctgagacctctccccatctctgcagggatgaggggccaactctgtagcccaggctgttgcttcccggtctgttgatgaatcctccatagtctggtgagtgtagtgtctgactctggagcccaggctattgcttctctgtctggtgatgcttcctccatactctgtagtctgctgtgtgtaaacatatgtatatatatatatatatacatatatatgtatataatttatacatataactgtaaataaaaataattatataattatgtacataattatttaaataaataaatgtaaataaatacatatataattatatatatataatatatatatttatatatataaaaaatatatatattttttcccttctcatatcaatttgcttatcatatcatttacttattatatctgtattgccatataattgagacaaaagatgtttacccttaaaagtattgtgtgtgccttttcttcttcctcatggatctcccatgcagaacacatgcctgacaaatttttatatttttagtggagactgggtttagccatgttggccaggctgatctcaaactcctgacctcaggtgatccttccatctcggcatcccaaagtgctgagattataggcatgaaacacccagccaggaggaggcatttctacaaagaaaacatacaaatggcaaacagacatataaatgttgctaaacatcattaaacctcagagaaatgcaaatcagaactacaataagacattatctcactccagttaaaatgtcttatatcccaaagacagacaataacaagtgctgacgaggatgtggagaaaactttagtgcactcttggtgggaatgtaaattagtataaccactataaaaaagtgtggaggttcctcaaaaagctaaaaattgagctgccacagctacaatgcaacccaacaatcccagtgatgggcattgacacaaaagaaagaaaatcggcttgttgctgcactgtttacaatagctaagatttgaaagcaaactgtctacaaatgaatgaatgtataaaaaaagtagtacatatatacattggagtagtattcagccataaaaatgagattttgtcttttacgacaacgtggataaaagagaagagtatgttaagtgaaataagccaggcacagaaagataaacactgtgcgttctcacttattcgtgggatggaagaattaatacaactgaattcacggacatagagagcagaaggatggttttcagaagctaagaaagacagtggaggctgggggaaaggtggggactgttaatgtgtacaaaaaaatagaataaataagacatattatttgatagcacaacgagatgactctggtcaataataatgtaattgtacattttaaactagctaagaaggaataatcagattttaacccaaagaataaatgcttgagtgggtgggtatcccattctctatgatgtgattattatgcattgcgagaccgcatcaaaacatctcatgaaccccataagtatatacacctacaatgcatcctcaaaaattacaaattaactgaagtaaataaaataaaactatttaaaaataaaatatcataacattaactagccccagaaatataagattttaatgaaataaaaatgcctctataataatcaaacagtgagaagaaagtcacactttactcctatttttgtttctgatctatcttctatctagtttcaagttgtagaattttcttttttcatttctaattaaattttattttattttatttttttattatactttaacttttacggtacatgcgcacaacatgcaggtttgttacatatgtatacatgtgccatgttggtgtgctgcacccagtaactcgccatttaacattaggtatatctccaaatgctatccgtcccccctcaccctaccccacaacaggccccggattgtgatgttccccttcttctgcccatatgttctctttggtcaattcccacctatgagcgagaacatgcggtgtttggtgttttgtgcttggatagtttgctcagaatgatggttccagcttcatccatgtccctataaaggacatgaactcttcattttttatggctgcattttgttccatggtgtatatgtgccacattttcttaatccagtctatcattgttggacatttgggttggttccaagtcttcgctattgtgaacagtgccgcaataaacatacttgtgcttgtgcctttatagcagcatgatttatactcccttgggtgtatacccagtaatgggatggctgggtcaaatagtatttctagttctagagccctgaggaatcgccacactgacttccacaatggttgaactagtttacagtcccaccaaccgtgtaaaagtgtttctatttctccacatcctctccagcacctgttgtttcctgattttttaatgatcgccattctaagtggtgtgagatggtatctcattgtggttttgatttgcatttctctgatggccagtgatgatgagcatttttccatgtgtctttttgctgcataaatgtcttcttttgagaagggtcttcatatccttcacccactttttgatggggttgtttttttcttgtaaatttgtttgagttcgttgtagattctggatattagcccttcgtcagatgagtagatggcacaaactttctcccattctgtaggttgcctgttcagtctgatggtagtttcttttgctgtgcagaagctccttagtttaattagatcccatttgtcaattttggcttttgttgccattgcttttggtgttctagacatgaagtccttccccatgcctatgtcctgaatggtattgcctaggttttcttctagggtttttacggttttaggtctaacatttaagtcttgaatccatcttgaattaatttttgtataaggtgcaaggaagggatccagtttcagctttctacatacggctagccagttttcccagcaccatttattaactagggaatcatttccccatttcttgtgtttgtcaggtttgtcaaagatcagatggttgtagatatgtggcattatttctcagggctctgttctgttccattggtctatatctctgttttggtacaagtacaatgctgttttggtcactgtagccttgtagtatagtttgatgtcaggtagcgtgatggctccagctttgttcttttggtttaggattgacttggcaatgagggctcttttttagttccttatgaactttaaagtagttttttccaattctgtgaagaaagtctttggtagcttgatggggatggcattgaatctataaattaccttgggcagtatggccattttcacgatattgattattcctacccatgagcatggaatgttcttccatttgtttgtatcctcttttatttcattgagcagtggtttgtagttctccttgaagaggtccttcacgtccttgtaagttgggttcctaggtattttattctctttgaagcaattgtgaatgggagttcactcacgatttggctctctgtttgtctgttattggtgtataagaatgctaatgatttttgcacactgattttgtatcctgagactttgctgaagttgcctatcagcttaaggagattttgggctgagatgatggggttttctagatatacaatcatgtcatctgcaaacagggacaatttgacttcctcttttcctaattgaataccctttatttccttctccttcctgattgccctggccagaatttccagcattatgttgaataggagtggtgagagagggcatccctgtcttgtgcctgttttcaaagggaatgcttccagcttttgcccatttagtatgatattggctatggctttgtcagagatagctcctattactttgagatacgtctcatcaattcctaatttattgagagttttttgcaggaagagttgttgaattttgtcaaaggccttttctgcatctcttgatatctcaagataatcacatggtttttttgtcattggttctgtttataaggtggattacgtttgttgatttgtgtatgttgaaccagccttgcatcccagagatgaagcccacttgatcatggtggataagctttttgatatgctgctggattcggtttgccagtattttattgaggatttttgcatagatcttcatcggagatattggtctaaaattctctttttttgttgtgtctctgccaggctttggtatcaggatgatgctgtcctcataaaatgagttagggaggttccctctttttccattgattggaatagtttcagaaggaatggtaccagctcctccttgtacctctggtagattttggctgtgaatccatctggtcctggactttttctggttggaaagctaattattaattattgcctcaatttcagagcctgttattggtctattcagagattcaaattcttcctggtttagtcttgggtgggtgtatgtgtcgaggaatttatccatttcttctagattttctagtttatttgcatagaggtgtttatagtattctctgatggtagtttgtatttctgtgggatcggtggtgatatccccttgggtttaataaacagataacatcaaacattcaactaatccaataaaaagaaattttattcatttgagaatgtgttttccagagcatacttatatattacgttttaacttcataatttatattttataaaaacataactaattcaagttaatcttctctaatttttaattcaattgaatttttatcaggatcactatatttaaacaaaaattacctgaatttttcacatcataatttatagattctgcttctacaaattgtctgtagggaccattatttctacacggtctactttcctgggttaagtggtggatacccaaatgttttttggaataatgttttcttatatcagtttttagtcagtgatacgttgcaccatgtttaattttaagcattatcagttttcttttttttttttaattgatcattcttgggtgtttctcgcagagggggatttggcagggtcacaggacaatagtggagggaaggtcagcagataaacaagtgaacaaaggtctctggttttcctaggcagaggaccctgtggccttccgcagtgtttgtgtccctgggtacttgagattagggagtggtgatgactcttaaggagcatgctgccttcaagcatctgtttaacaaagcacatcttgcaccgcccttaatccattcaaccctgagtggatacagcccatgtttcagagagcacagggttgggggtaaggtcacagatcaacaggatcccaaggcagaagaatttttcttagtacagaacaaaatgaaaagtctcccatgtctacctctttctacacagacacggcaaccatccgatttctcaatcttttccccacctttcccccctttctattccacaaaaccgccattgtcatcatggcccattctcaatgagctgttgggtacacctcccagacggggtggtggcagggcagaggggctcctcacttcccagtaggggtggctgggcagaggcgcccttcacctcccggacggggcggctggccaggctgggggctgacccccccacctccctcctggacagggcggctggccgggcgaggggctgaccccctcacctccctcccggatggggcggctggccgggcggggggctgaccccccacctccctcccggacggggcggctgactgggcggggggctgacccccccacttccctcccggatggggtggctggccgggcagaggggctcctcagttcccagtaggggtggccgggcagaggcacccctcacctcccggacggggcggctggccgggcggggggctgacccgcccacctctctcccccccagaaggggtggctggccgggcggggggctgaccccccacctccctcccagacggggcggctggccgggcagagaggctcctcacttcccatcaggggctgccaggcagaggcacccctcacttcccggatggggcggctggccgggtggggggctaacccacccacctccctcccggaggaggcggctggccgggcgggcggctgaccccccacctcccttccggatggggtggctggccaggcggggggctgacccccccacctcactcccgaacgaggtggctgccgggcggagacgctcctcacttccgagacggggtgactgccgggcggaggggctcctcacttctcagacggggtggttgccaggcagagggtctcctcacttctcagacggggcggccgggcagagacattcctcacatcccggacggggcggcagggcagaggtgctccccacatctcagatgatgggcggccgggcagagacgctcctcacttcccagatgtgatggcggccgggaagaggcgctcgtcacttcctagatgggatggcggccgggcagagacgctcctcactttccagactgggcagccaggcagaggggctcctcacatcccagacgatgggcggccaggtggagacgctcctcacttcccagacggggtggcggccgggcagaggctgcaatctcggcactttgggaggccaaggcaggctgctgggaggtggaggttgtagcgagccaagatcacgccactgcactccagcctgggcaccattgagcactgagtgaacgagtctccgtctgcaatcccggcatctcgggaggccgaggctggcggatcactcgcggttaggagctcagcccggccaacacagcgaaaccccgtctccaccaaaaaaatacgaaaaccagtcaggcgtggcggcgcgcgcctgcaatcgcaggcactcggcaggctgaggcaggagaatcaggcagggaggttgcagtgagccgagatggcagcagtaccatccagcttcggctcggcatcagagggagaccgtggaaagagagggagagagagaccgtggggagatggagagggtgagggagagggagagggagagggagagctatcagttttctttcttgtgcattattttcacagtaatataaattatggacatcaaaatatcctcagggttaaaaacgttggagtccaagcattctatattcttgatttgtatggtttcacttatgactcagcattttaggaaaacattggctctataatctgtcaccctcaccccatttaaataaaaacatacttttttggacacaaggatcaggcatacacatctacacagtggatcacatcatttttgggggcaaactgaaaactgtttttatactcaaacatactgttgggaaactgtgaaataaaaatttctgatgtttgttaaaaattgggaagaaagacattaatactattgtagtagattttatggccatcgtaatagggttcagttcagaaattgatcataactctgaacacagacaacgaagaatttatagtcaataagcagaataaatcagtggataaaaattattgaaaaacatttgataaaataccaaaggaggaagaggaactttttatagcagaaggctggttacaggttggctaaggacttaaatatcaaagaaagggaatcacgatattagtagacataagggatatgtggatttttactaaacagtattagcaggatttatgaaagtgagcctctcaaaccaggagcagggcaagaagtcaaggttggcttagtcaaaaagagggttcagttaagcttgactaacatttggtcataaagggagtgcttacaagaacccagatttttttcccatctgatctgaaaataaataatcaccaaaaaaggctttgtttgaaaaatgagtgcccacttcacctgagaaaacctccatcttcttctgtttacctttgaatttagtgtagaaaaagagcacttgtcatcgccacagttttaattttgctttcactcttaaaaacagagagtcagggctgggtgtggttgttcatgcctgtaatcccagcattttgggcatggtgatgcaagcacacctgtaatcccagctacttgaaaggctgaggcaggagaatcacttgaacccaagagtcagaggtttcagtgagccaaaatcacaccactgcactccagcctggtgacagagtgagactccatcaaacaaaacaaaacaaaacaaaacaaaacaaaacaaaacacaaaattagaaatttagttttattcaaacagcaacttacaaacacaaaggttatagtttctgacccctattcaagacaattggttgtaaccataagtattgatgggacttcagggagattcctcagatggagctgatgcagctgtgcaagccactttgaccttgcatctttcctacttcttagcctttgaaatggacatggttgctggtgcaggcttgtgctcctacagccagccatatgggaccatgagacagcctacaggataaaaaccatctactgaaatattgtagcaaagtgtgccaagagggttgactagaagtagctatggtgtgtggctttcatgaaaagaaacaaagagggaaaataaatacagcaccatcaactgaaacacccagatatttgcagtgggactaatgaaggaaacagctcaacccatgggaaaaagaagggcatggcaaccgcccacccgggagtaacacagaccaaagggaacctaccctgcccaaggaagtggtgagcaaatacgtgaccctgagaaaccacacttctcccatggatctttgcaactctcggatcaggagattttctcgtaaacttattccaccagggcctttggtctgatacacagagctgcgtgttcccggcagaacaactgctcagacacaaacagaatcgcaggagctttacatattttggctctgagatctctggcaaaggtgactgcaactcagacaaggtgggaggttggatctccgtaaatgcccctagaaaggaagctgaatccatgggcctgagcagcatcagtgggccccacttccatgacgcctcacaggataagatcaactggcttggaattccatccagcccccagcaacagcattgcaattacctgggatggaacaacgttcctggaggcaggggctggctgctatatttgctgtttggatgactcagccattccagcctggaggtttaggagagttaaaaaaaaaaaaaactcatggcagatggaagaaatcccttagcacggcacattggccctcccaaagtttggccggactacttcttgaagtgggacccagatacctttttcatctcagagtggggcctcctaccagagcctccagacagccccttccatattctccggcaggcagagttttgatttattcctggatgcagtgcacattgggagcagtgggtcttcatatttgttgtttggagaactcagccataacaatcagtgggcttaggagagtccaaaccatcccagggaagaaggaatcccccagcatagcacagtggatctgccataatgtgatcagattgcttctttaagtgggacctaatatgctctgcatctctgggtggaacttcccaaccagggcctccagcaactcccactgatgttgtctggctggcagaggtttaaaaacttcctgggccagagttcctagagagaggggttggccaccatctttgctgtttcagccactttgctgtttcagcctccaggctttggagagcccaatctgatgaagggcagaaatggtaccccgcacagcatggctgatctatgaaagtggggctagatggcttaagtgggtccccaatcctattcctcctagctgggtgagacctaccaactggggtttccagtcacctcctacaggtgtgttcgagccctcaacatgtctgcacccgccctgggatggagctcccagggaagggagtgggctgctatctttcttgtttcacagccttcactggtgatacccccagatactggaaaatccgaggtgacaagagagtggagcagatgcccaacaaactacagcagccccacacaaaatggccaaacagttaaaaggaagagaaacaaacaaaaatctcattcaaaggccagcaacctcaaagattaaagatagataggcacacaaaggtgagaatcacaacaagaatactaaaaactcaaaaatcagggtgctctccctctcccaaatgaccacactacttctccagcaagagttcagaataagggtgaggctgtgatccctgaaataacagaagtagaccccagaatgtggataaaaatgaacttcactgatctaaaggagcatgctctaactcaatacaagaaagctaaaaattacaatataatattgcaggagctgacaaacaaattagccaggatagagaggagcctaaccaacccgatagcactgtaaaacacaatacaaaaatttcataatgcaatcacaagtattaatgaggaaagaaactcagagcttgaagtttgtatttctgaaagaagacatgcagagaagaatagaaaaaaagaatgaaaggaataaacaaaacctttgagaaatatgggattatgtaaagagaccaaatctacaactgattggtgtacttgaaagagctggggagaatggaaccaatcaggaaaacatatttcaggatatcatcaatgagaacttccccaaccttgctacactggccaacaattcagaaaatggagagaagttcagtaagatactccaagaaaaaatcatacccaagacacataaacgtcagattccccaaacttgaaatggaagaaaaaaaaagaaaaaaaagctcagccgcagagaaaagccaagtcacctacaaaaagaagttgatcagactaagagcagagctgtcagtgagaaccctacaagccaaaagagattgggggccaatatttaacgttcttaaagaaaataaactttaagccagaattttatatctggccaaactaagcttaatctggggagaaataacatccctttcagacaagcaaattccgagttaattcatgaacaccagacatgcttttcaagagctcctgaaggaagcaccaatttggaaagggaaaattattcccagccaccacaaaaacacactcaagtacacagaccattgacactataaatcaaccacataaacaagtctgaaaaataaaaataaccagctagcatcaagataacaagataaaatctacgcataacaatacttaccttaaatgtaaatgggataaatgccccagttgaaacacacagggtggcaattgtataaaaaccaagacccattggtatgctcttcaagacacccatctcacatgcggggacacacataggctaaaaataaagggatggaggaaatttcaccaagcaagtggaaaacctaaaaaagcaagggttgcagtcttactttccaacaaaacagactttaaagcaacacagattaaaaacaacaacaacaacaacaacaaagagggtcattacataacggcaaataattcaattcaacaagaattaactattctaaatatatatgcacccaacacaagagtacccagattcatataacaagtttctagatatcttgaaagagacttagaacaccacacaataatagtgaccgactttaacatcccactgacagtattagaaagattattgagacagaaaattaacaaagatgttcaggacctgaacttagctctggatcaaatggacatgatatatatttacagaactctccacatgaaaacagcagaatatacattcttctcatcactacatgacactttctctgaaattggtcacttagccagaagtaaaacactcttcagcaaatgcaaaagaactgaaatcataataaacagtggctcagatcacagcacaatcaaattaaaactcacgatgaaataatttactgaaaaccataaaattaaatggaaattgaatcacctgctcctgaataacttttgggtaaataatgaaattaaggcagatatcaaggagttctttgaaaccaatgagaacaaagacaaaacataccagaatctctgggacacagctaaggcagtattaagatgaaaatttatggcattaaatgcccacattaaaatgccagaaatgtctcaagttacaacttcacaacaaaaataactacaggaacaagagcaaagaagttctagagctagcagaagacaagaaataaccaaaatcagacctgaactgatggagatagggacaagagaaaccattcaacagatcaacaaattcaggagctgtttctttttctttgaaaaaaccaataatataaatacaccagtagtagactaataaggaagaaaatatcaaaaattaaaatgaacacaatcagaaataataagggttaccactgaccccacagaaataaaaataaccatcagaaaatatcataaacacctctatgcctataagataacaaattcagtagaaatggataaatttctggacacatacacccttcaagaataaaccaggaagaaattgaatccctgaaaagacaaacaacaggctctgaaattcaggcagtaataaatagcctacaaaccacaaaaagatcagaaacacaaagattaaaagctgaaggttatgacatttatgaagaagaactggtacaattcccactaaaattatttcaaaaaactgaaacagagggcttccttcccgactctttctatgagagcacatcatcctggtaccaaaacctggcagacacacaagaaaaaaaacaaaacttcaaaaaatttgcaagaagaaaacaaccccatcaaaaagtgggcgaaggacatgaacagacgcttctcaaaagaagacatttatgcacccaaaaaacacatgaaaaaatgctcaccatcactggccatcagagaaatgcaaatcaaaaccacaatgagataccatctcacaccagttagaatggcaatcattaaaaagtcaggaaacaacaggtgctggaggagatgtggagaaataggaacacttttacactgttggtgggactgtaaactagttcaaccattgtggaagtcagtgtggcaattcgtcagggatctagaactagaaataccatttgacccagccatcccatttctgggtatatacacaaaggactataaatcatgctgctttaaagacacaggcacacgtttgtttattgcggcactattcacaatagcaaagacttggaaccaacccaaatgtccaacaatgatagactggattaagaaaatgtggcacatatacaccatggaatactatgcagccataaaaaatgatgagttcatgtcctttgtagggacacggattaaattggaaatcatcattctcagtaaactatcacaagaacaaaaaaaccaaacaccgcatgttctcactcataggtgggaattgaacaatgagatcacatggacacaggaaggggaacatcacactctggggactgttgtgatgaggggggaggggagaaggatagcattgggagatatacctaatgctaaatgtcgagttaatgggtgcagcacacaagcatggtgcatgcgtacatatgtaactaacctgcacattgtgcacatgtaccctaaaacttaaagtataataataataaaataaaaaaagaaaaaaaaaaacttcatgccaatatttttgatgaacatttatgcaaacattcttaacaaaataggggcaaaccaaatccagcagcgcatcagaaagcttatccaccacaatcaagtaggctccatctgtgggatgcaactttaattcaacgtacacaaatcaatatgtgatttatcacataaacagaactaaagacaaaagccacatgattgtctgaatagatgcagataaatctttgcatccataaaattcaacatccattcttgtaaaaactctcaataaactaggtattgaaaaaaacatacttcaatataataagaaccatgtatgacaaacccacagccaatatcatactgaaagggcaaaagctgaaagcattcccttttaaaacgggcacaagacaaggatgccctctctcatgaatcctatttcagatagtattggaagtactgggcagagcaatcaggtaagagaaaaaggcattcaaattgaaagaaaagaaattaaacaacacctgatgtcagacgacatgattctatatcttgaaaacccctattgtctcaaccccaaagcttcttaagctgataaatatctttaacaaagtcccaagatacaaaataaatgggccaaaatcactagcactaaatccttatataccaacaacagtcaagccaagagcaaaatcgtgaatgaacactcattcacagttaccacaaaaagaataaaataccaaggaatgtatctaacaagagaagtgaaaggccactacaaggagaactataaaccacttctcaaagaaatcagacatgacataaacaaatagaaaaacatttcatgcttatggatagaaagagttaatattgttaaagtagacacactccacaaagaaatttatagagttaatagtatttccgttaaactaccaatgacatttttcacaaaactagaaaagctattttaaaatttatatggaaccaacaaaggcctgaatagtcaagacaaccccaaacaaaaagaactaagctggaggcatcacactacccaacttcaaactgtgctacagggctacagaaaccaaaacagcatggtactggtacaagaacagacacacagaccaatgaaacagaatagaggacccagaaataagactgcacacctacaactaactgatcttcgacaaacctgacaaaaacaagcaatgaaaaaacgactctgtactcaataaatggtgctgggataactgcctagccatgtgcaaaaaattgaaactgaaccccttcctccatcatcctctgcaactaacacaggaacagaaaactaaccaccgcatattctcactcataagtgggagttgaacaataagaacacatggacactggaagggaaacaacacaactggggctagtcagggaatgggagtcgaagggagggagagcattaggataactagctaatacatgtgggacttgaagcctggataacgggctgataggtgcagtaaaccaccatggcacacatataccaatgtaacaaacctacacattctgcacttgtacttcagaacccaatttaaatttaaaaaataaagaaagattccttacatcatatacaacaataaactcaacatggtttaaatgtaaaacccaagactataaaaactttggaagacaacctaggcaataccattcaggacataggcatgggcaaatattttatgatgaaggcgcaaaagcaattagaacaaagagaacattgacaaatgggatctaattaaactaaagagcttttgcacagcaaaagaaactatcaacagagtaaacagacaatgtatagaatgggagaaaatttttgcaaactgtgcatctgacaataatctaatttctagcatccataaggaacataaatttacacgagaaaaacaaacaaccttattaaaaattggccaaaggacacacagaaacacttcttgaaagaagacatacatgcagccaataagcgtatgaaacagaagttcaacatcagtgaccattagagaaatgtaaatccaaaccacaatgagatatcattttataccaggtataatggttaccatgaaaaaatcaaaaaatcacagatgctgacaaagttgtggagaaaaagcaacatttttaccctgttggtcgagttcaaacgttgtggaagacagtgtggtgattcttcaaagacctaaagaaaagaataccatttgacctagcaatctcattactgggtatatacccaaacaaatataagtcattctattataaagatacctgcacgcacaagttcatcacagccctattcacaatagcaaagacatcaaatcagcctacatgttcatcaataatagactggttgaagaaaacgtagttcatatacaacatggagtactatgcagccataaaaaagcacaagattatgtcctttgtagggacatggatggagctggaggccattatccttaaaaaactaacagaaacagaaaaccaaataccacattttctcacttataagtggagggtagatgatgagaacacacagaaacatggaggggagcaacacgcaccagggcctatcaggaggtagggggtgagaggagggagagaatcagaaaaaataactaatagttagtagacttaatacctgggtgataaaacaatctgcacaaccaaacttcgggacggtatgtttccatatttaaagaacctgcacatcctgcccatatacccctgaacttaaaacaaagttcaaaaaagaaaaacattttagcaaaatgacagactatttttgactaccttcgtgtacagttcagagtcagactgcccagctctaacatccttatttatgagaaagaaagcattctctctcttatctgcactattatattgggttttcttttttaatttttttgagacggagtttcactcttattgcccagactggagtgcaatggcgcgatctcggttcaccacaatctctacctcccgggttcaagcgattctcctgcctcagcctctcaagaagcagggattacaggcatgcaccactacgcctggaaaattttgtatttttggtagagactgggtttctctatgttggtcaggctggtcttaaactccagacctctggtgatccgtctgcctcaacctcccaatgtgttgggataacaggcgtgaactacagcacccggtctgggttttcttctatatgtaggaaaatgtaatcctaactaaagtgctagctttgccatggaatctctgtgtaattctggatgttatgtcactttcctaagacttttttctatctgcatagtggtggaggcagtagtggggaagatttaattatacaaagggtccatcaatccatgtgttaagtgaggatgtcactactttccagactcagaggacaggggacatattgttatgctccatggaagctgtttgggggtggaggtggggctcacttgcacacattgtctgtgggccttgaaagatcaagtgtgtatgacccttcttgaacagaaggtccatgtgcccagtgcagaacccatctatttcttcccaagtgaggaagatctgggaacaccctgatcacagccttgctacaccaatcctagttggtagggacgttagaccatatgcatgttgagctgtggcttaagcattttgacatctcacatctcattggatatctgaaaaactgaggtctggagagaagcagggactggcccagagatgatgaagtgggcagagtccaagggaaaaaagagcattctgacctcctaggccagggctcaacactctcatggggtttgttttgggaatgagtccctgagatcctggggatttttgccaattttctcgtcatatgaagcaaactcatgtctgcatcatagaattccacaggtttgtgcatacacacacagacttctcaggctaaaggtcataagaggagttaacgctgatggagtgatgagaagaaaaaagatagaggataggggcagctttgtcatggggtagaagcaccccatcttctggtaacatgcccaggacccataacatgggcaggggaaggcaataggctgatggcttgagaggctcaaggcttccatggatctgactgggctgcagccaacaccaggatagctttccaaggacaaaaccttactttctccattcattaatctgcataattaaaatggtaaggaatccccctacacccaatatggagaggaatacagtagtgaaaaccttcaatttttccctgtacaaattgacataattgaactgtgtgacccctaaatttgaaaggcttaaagaagtgagttgaccttgctgtctatcaattaccactgtactctcagaactttggaaattgctctgtgtcctccgaaggtctttcagagcagaaagtggcctaggggtgtgcgggactgagcactcaggctggtgtagaatgtgacagatcctcagaccactgctctgggatccaaggagaagaccttctcggtcagagctttggggatcttttttttggagggggcgatcttttttgaaagtggagacagaatcgttttccagggctccctcatttgccctcctgtttcatagtatttcttttttctgtctttctttctttctttctttctttctttctttcttctttctttctttcttctttctttttctttctttcttctttctttctttccttctttttctttctctttctttctttctccttcgtttcttttctttcttcctttctttcttctttctctttcttttgttcttccttcattccttccttccgtttctttctttcttctttctttctttcctcttccttcattccttccttccttttctttctttctttctttctttctctttctttctccttccttcctccctccctttcttttctttctttccttattttcttttttctttcttctttctttctttcttctttctttctttctttctttctttctttctttctttatcagagtctctctcttctcgctctttcacgggactggagtggagtggcatgatctcggctcactgcaacctccacctcccgggttcaagtgattcactgcaacctccacctcccaggttcaagtgattctcctgcctcagcctcctgagtagctgggaatataagggcgtgccaccaagcctggctaatttttgtattattagtagagacggggtttcgccatgttgtccaggatggtctcgatctcttcacctcgtgatctgcttgtatcagcctctgaaaaaaactgagattataggtgtgagccaccacacaaagcctacagtttatttttctttgcttgttaaaatgttttagtcagctaaaatttacacaatatagagttctacatactatctaatataaagtgtaaaattcagtgcttttcagtttatttacaatgctatgcaactgtcacccttatcaaattccaaaatagtttcatcaccctctcaccaaaaaaactccatatccattaagcagtaatttatcattcatccaccgaatttccttggtaaccactgattgactttctatctctagtactctctttctttctttccttttttttttttttttttggtgtctcactctgtcacccatgctagagtgcagtggcacgatctcggctcgctgcaagctccacctccctggttcacgccattctcctgcctcagcctccagggtagctgggactacagatgcctgtcagcacgcccagctatttttctttgtatttttagtagagacagggtttcaccatgttagccagcatggtctcgatctcctgacgtcgtgatctgcctgcttcggccacccaaagtgctgggattacaggcgtgagccatcacacccggcttctatttctagttttctattctagtcactttatagaaatataataatataatatgtgaccttttttctttggcttttctctttgagcgtgttttcattatttatccatgttgtggcacatatcagttctgtatttatttttatggctagctaatactccattgtataaataatattctattggccagggacgatggctcacacctataaactcagtattttgggaggctgaggctggtggatcacctgaggtcaggagttctagaccagcctggctgacatggtgaaacactgtgtctactaaaaatacaaaaattagccgggcgtggttcctgaaagcccaattgctcaggaggctgaggccagggaatctcttgaacccaggaggtggaggttacagtgagctgagatcgtgccactgcactccagcatgggtgacagagcaagactgtctcaaaaaaaaagaaagaaaatgagaggaaatatgtgcaaactacacagctgacaagcgattgataagcagaatacagaataaacaaaaaactaaataaaaaattagtttaactttaaaatgggcaataatcttcagaaacatttctggaaaatgtaaggggcataaacatagaacctaaaagttagagaagaattatgaaaaaactgaaggatatagaaaaaataatttcagactattcacattaaaatttaattagagagggggtggagccaagatgggcgaataggaaaagccttagtctagaactcccagcatcggcaatgcagaacacaggtgatttctgcatttccaactgaggtaccgggctcatctcactggggagtgtcagaaagtgggtgcaggacagtgggtgcagcgcaccccatgtgagccaaagcatggtgaggcatcgcctcacccaggaagtgcaaggggtcagggaataccctttcctagtcaaagaaaggggtgacagattgcacctggaaaatcgggtgactcccaccctaacactgtactgttccaaaggtcttagcaaacggcataccaggagattatatcctgcacctggctcagagggtcctacgcccacagagccacaatcattgctagcacagcagtctgagatcaaactgcaaggcaacaacaagcctgggggaggggcgcccaccattgccgtggcttgagtaggtaaacaaagcagccaggaagctccaactgggtggagccaactgcatctcaaggaggcctgcctgactctgtagactccacctctgggggcagggaatagccaaacaaatggcagcagaatcctctgcagacttaaatgtccctgtctgacagctttgaagagagtagtggttatcccagcatgcaactggagatctgagaacagacagactgcctcctcaagtgggtccctgacccccgagtagcctatctgggaagcatccccagtaggggcagactgacacctcacacggccgggtactcctctgagacaaaatttccagaggaacaatcaggcagcaatatttgcttttcaccaatatccgctgttctgcagcctccactgctgatacccaggcaaacagggtctggagtggacctccagcaaactccaacagacctgcagctgagggttctgactgttagaaggaaaactaacaaacagaaagtacatccacaacaaaatcccatctgtacatcacaatcatcaaagaccaaaggagagaaaactacaaagatggggaaaaaacagagcagaaaaacggaaaattctaaaaatcagagtatctctccacctccaaaggaacacagctcctcaccagcaatggaacaaagctggacagagaatgactttgacgaattgagagaagaaggcttcagacgatcaaactactccgagctaaaggaggaagttcaaacccatggcaaagaagtgaaaaacctttaaaaaaattagatgaatagctaactagaataaccaatgcagagaagttcgtaaaggacctgatggagctgaaaaccaatgtacgagaagtacgtgatgaatgcacaagcctcagtagccaattcgatgaactggaagaaagggtgtcagtgatggaagatcaaatgaatgaaatgaagtgagaaaagaagtttagagagaaaaagataaaaagaaatgaacaaaacctccaagaaatatgggactgtgtgaaaagaccaaatctacatctgattggtgtacctgaaagttatgaggagaatggaaacaagttggaaaacactctgaaggatattatccatgagaacttccccaatctagcaagggagggtgacattcaaattcaggaaatacagagaacaccaaaaagataatcctcaagaagagcaactccaagacacataattgtcagattcaccaaagttgaaatgaaggaaaaaatgttaagggcagccagagagaaaggtcgggttacccacaaagggaagcccatcagactaacagctgatctctcggcagaaactctacaagccagaagagtggggaacaatattcaacattcttaaagaaaagaattttcaatccagaatttcatattcattcaaactaagcttcataagtgaaggagaaataaaatcctttacatacaagcaaacgatgagagattttgtcaccaccaggcctgccctaaaagagctcctgaaggaagcactaaacatggaaaggaacaaccggtaccagccactgcaaaaacatgccaagttgtaaagaccatcgaggctaggaagaaactgcatcaactaacgagcaaaataaccagctaacatcataatgacaggatcaaatgcacacaaaacaatattaaccttaaaagtaaatggactaaattctcccattaaaagacacagactggcaaattggataaagagtcaagacccatcagtgttctgtattcaggaaacgcatctcacgtgcagagacacacataggctcaaaataaagggatggaggaagatctaccaagcaaatggaaaacagaaaaaggcaggggttacaatcctagtgtctgataaaacagactttaaaacaataaagatcaaaagagacaaagaagtccattacgtaatgataaagggatcaatgcaataagaagagctaattatcctgaatatatatgcacccaatataggagcacacagattcataaagcaagtccttagagacctagaaagagacttagactcccacacaatagtaatgggagattttaacaccccactgtcaacattagacatatcaatgagacagatagttaacaaggatatccaggaattgaactcagctctgcaccaagcagacctaatagacatctacagaactgtccaccccaaatcaacagaatatacattcttctcagcaccgcaccgcacttattccaaaattgaccacatagttggaagtaaagcactcctcagcaaattgtaaaagaacagaaattataaaaacctctctctcagaccacactgcaataaaactagaactcaggattaagaaactcactcaaaaccgctcaactacatggaaaccaaacaacctgctcccgaatgactactgggtacataacgaaacgaaggcagaaataaagatgttctttgaaagcaacgagaacaaagacacaacataccagaatctatgggacacattcaaagcagcgtgtagagggaaatttatagcactaaaggcccacaagagaaagcagagaagatctaaaattgacaccctatcatcacaattaaaagaactagagaagcaagagcaaacacattcaaaagctagcagaaggcaagaaataactaagatcagagcagaattgaaagaaatagaaacataaaaaacccttcaaaaaatcagtgaattcaggagctggtttttgaaacgatcaacaaaattgatagactgctagcaagactagtaaagaagaaaagagagaagaatcaaatagacgcaataaaaactgatcatttatgtggctcaagttctctaatataacatagtacggtcaaaatggaagggtaaaaattgcaagaccaccttaacgtttgtcatcttaagtgtactataaaaatgccttttaaattaattcagtgaataggtttttaagtgcatgttttagattatgctgaactgtcaaataccagcacatccctaatttgcagtagattaacagcactttttagcacacatcacagagttgttcggtggccaaattgaaaaggcacctcctctccatgtggtcattcagaaactcaaagttctttcattatttgtcttcatcatccatgagtcgtggttgccgtttgtgttcagtcccctgaaaataaagtactttaagaaatgcatgcgagaagacttgatggactcatcttaatgtgactcacatccatctcactctacaaccattaacaataactggtcacgtttccacatctcatgcaaatgaggctaagaaatgtaattctgctgtgtccctaataaatgggagaatagaatttgttgaatgaccagagttttccgtaacattgtgtcactcatatggatttactgtgtttctcaaatatttattaaacatctgtcatagccaagcactgtgataaggagtacagggaggacagagagctgactcagcagagtcctagtctgaaagaaactcacaatctaagaaaataagaaaagtcatgttaggtgctgctataaaggcacatgcacacgtatgtttattgtggcactactcacaatgcaaatacttggaaccaaccgaaatgtccaacaatgatagactggatcaagcaaatgtggcccatatacaccatggaatgctatgcagccataaaaaatgatgagttcatgtcctttgtgtgtacatggatgaagctggaaaagataattctcagcaaactatcacaaggacaaaaaaaaacaaacaccacatgttctcgcttataggtgggaattgaacaatgagaacacttggacacaggaagggtaacattacccactggggaatgttgttggggggggaggggggagggatagcatttggagatatacctaatgtaaatgacgagttaatgggtgcagctcaccaacatggcacatgtatacataagtaacaaacctgcacgttgtgcacatgtaccctagaacttaaagtataataaatatatgtataacatacgtatatattatatacatgttcaagggattctcctgcctcagcctcccaagtagctgggattacaagcgctgccattactcccagctattttttgtatttttagtagagaaggagttttgccatgttgaccaggacggtctggatctcctgacctcatgatccacaccccttggcctcccagagtgctgggattacaggtgtgagccacagcccccggcctatatgagttttcaaatagttttttctagctccgtaaaaaatttcattggcagtttgatggaaatagtattaaatctgtaaatttctttgtgaagtatagccattttagtgatattgcatcttcctatccgtgagcatgggatggttttccatttgtttgtatcttctctgatttctttgagcagtgttttgtaaatctcattgtagagctctttcacctccctggtgagctgcatttccagatattttattattttagtggcaattgtgaatgggatggcctttctgattttgctgtcagtgtggctatcgttggtgtagaaaaatgttagtgatctttgcacattgatttagtatcttgaaactttgctgaagctgtttgttaactaaagaagctttgtagatgaaactacagggttttctagatagagaattatgttatctgcaaacagaaatagtttggctttctctcttcctatttggatgttcttcggatttctttctctagcctgattgctctggtcagtactgtcaatactaagttgaatagaaatggcaagagagggcattcttgccttctactggttttaaaaaataatgttcccggcttttgcccattcaacacattgttggctgtgggtttcttatagacggcttttattattttctgcgtctattgagataatcatcttttttttgtttttagttctgtttatgtaatgtattacatttattgatttgcacatgatggaccaaccttgcgtcctaaggaggaagcctacttgatcatgacggattacctgtttgatgtgctgctggatttgcctcccaaatattttgttgagaacttttgtattgatgttcgtcaagaatgttggcctgaagttttctttcccttctttctttttttttttttttttgacggtgtctccctctgttgcccaggctggagtggattgcactggcgcgatctctgcttaatgcaatctctgcctcctgagttcacgccattctcctgcttcagcctcccaagtagctgggactacaggtgtctgctaccaagcccggctaattttttgtgtttttgttgtgtctctgcctgttttggtgtcaagatcatgctgtcctcatagaatgagttggggagaagaccctccttctcaatttttgggtatagtttctgtaggaattgtaccagctcttctttgtacatttggtagaatttggctgtaagtccataaagtccagagcttttttttttgattggcaagctacttattacctatttaatatcagagttttttactggtctgttcaggaaatcattgtcttcctggcttaatcttgagagagtgtgtatatctaggaatctatttatttcgttaaagttttctagtttgtgtgtataaagttgttcatgttagtgctgtccccagttaaataaaaacaactattagaaaccactaaagtttaacacttgtttttatatctttaatcaatttttatttaatttttctacttggaatgtgataaagattcaactttactggtttaaatgtggacttgttttcccagcatttcttgtgtaacaaactgtctttacataatgattaagacacacttttaaaaagacaaacaataatttatgaaagggttttttggagtatctattttatttatttgatctccacaattgttcttatgccactatcaaactgttataattttagtagctttttatgttttcaaatttaaaattgtgagccacctaattttgtccttcttttcaagattattctgtacattcagaggatgttcaaattccatatgaagttttaaatgagctattttctttttgcagaagaaaagttggaaaaatgaaaacttgggattacagtacatctgtacactcctttgggcagtggtattgtcatcttaacttcattaaatcttccggttcaggaacatggaatttgttgccagttatttaagtcctttttagtttttttcataaacattctgatcctgtattttttattgtacaagatatttacctccttattaaatttattgctaagaattatattattttaatgttgttgcgaacaattgttttcttaatttactgtcaaattgttaattgtatatggaaatgcagtttatgtttctgtgttgtaaaaataattatttcatgtctcaaatctagattagcaattcattcagaataaatatgctgtatatattactagtcatttaactttttccaataagctaaccaatttcaatatgtctaaatatgtaaaaatgttaaattgtgttagatttttcacttactctcacctgtcatttatctgtcagaattacattactgcgcactagaactttcatttctggggccgggcacggaggctcatgcctatattcctagcactttgtgaggccaaggcaggcggaccacctgagatcaggagttcgagacctgtctggccaatatggtaaaaccccgcctctactaaaaatacaaaaataagctgagcgtggtcttgggagactgtattcccagctactttggaggctgacactggagaatcacttgaacaatcccacgacacaaaacaaccgaggttagtcttcatgtcgaaagtcttcaatggattgtcttttatcacaggattgcttagtgcaacatttaatgggaaagatgcatgctactgagatgtagttctccacaagtctcttagagtttgttgttttgttgtggattacatcacatacctgtcctgttccacgttatttttcaaagatttttgtacacaaataacctggaaaaagggtagtagtttttctcttcaggtgaatggcagataaattactcaatcaatataataaagacaatttttctttgtgacgcaaaggttggacaggcttccatgtaacctactttaaaaagattgaggtttcttagtcttgagtctgctcagctatgacacaaatcttccccatgtacaatgtccatatgagccttttgaaatccttcaaaaaacgtagtatggacaaggagaactaatacaaatatgaggcttttgcctccaggtaagcagtaaatagtaggtattttttttcatacttcagtgtctcatgccttctaccagcatcgatgaaaatggaaggttaatatgttgtttacaaatgctataaaatcttagatacgtcacaattatttaattttggagatgactatggcatgctgagataaacacaactttctgaaaggggaaaaggaacaaatacttgaagagcttgcaagggatatgagaagttcccccaggaccaacagcaaattctctcggccaagtggttagtttggtgaagcaagagatcaagactctgctgtctgctaatgagactgatccttgagaggattataacaatgaacctgagagctttgcatgttcacttttctcctgctggaaaatcaaggagctcttaaagctaatgttgaggtttggatgagtccaaaacagtagaagttcatgtggttcagctgtgagcagcaaaaagactgcaaaaagccacattaagcaggttttgtaagtctctcctttacccacatgaaggaacccattccctctgcacttctaatttttgtcctttgtctacagctaacttcagcaactttaaatattaaactacatacgattggaggtttggatgggggaacacaaatgtatgtagttcctttggatatatgtatctaattcaccattctgtggagtcccttagggtgcacagggagatataggtgttagggtggctggaaatgctgacaaacctatcattctattaatccagttgcttccagataatggaaagcatggtaagtccactgacatccgtgaagatgagcacactgctacactttggctgtgaagtgagtttcttggtctgagcaatgctaagtggaatatcatagggatggatgagggattctgtgagtccatggagggtagttttggcagaattccacccagggaaagcaaatttgtatccatagtaagagcctactccagtgagtacaaactgttgccgcctatattataaaagttattcaacgtaataaatttactaccaggtgcctggtggatcaccctggaaatgatgtcatatcaaagactcagtgtagatctgtgctgctgtcaaattaaacattcagaattgactgtagccagactggcctttgggattcaaagttcatattgcttagcccgtgcattgcttctatttctgctactatgttcaccttgtttataagcccattgggtgatgatgggggtgacagggaagtaagaatgacccatactcacggaacaagacattctgtccacatcattatcaaaatcatgctctgatacggttaccccttagtagggattcatatagaacagacatatctttatgtaatttacccagtgagagaagtttatccacaaaagtttttctattttttttttttgccaggaattttgtaatcatgttccttccgtgtcattggtcatgtagccaattcatgggccacagcagtgttgcaggagtgagtatcataggatctcaaactcctgttcttaagcaatccttgcctcaacctcttaagtagctgagactataggtgcaccccacaacgcctaactaattttgttttatttttagtagagattagattttgctatgttttccaggctgttctcacactccccacctcaagcgattctcccagctttgcctgcaaagtgctttgactagagtcaaacctccacacccagcacctataatttgatattttaaacaatactatgtagcgaaagcaattacgaagttatctagggaaagaaagctcactatcacagtgtaaaattgtatagatatgatgcgggcatgtgtgtatacatgcttgcttgtgtgcataggtgcgtgttttctgagaaatggtaccttattgctaccaggctaggatagcattcatgttcttctgaagatgtcaaatattgaagctccaggattcatagaacaagattcctaagtggttcacgagagggtgaacgattgagtaatgggtattttggaagaaacaactggcctagggacaagaataagtgtgcaaatcatctgtgtgaaacacgctttcttcggagcacgcatttcatgcacttcattctactgtgacagatattgctactctgagtttgggagagattgaacctagggtctactgtgaaactctgtagactagacttctgtctgaggcagcccctgcctgtaaccgtaacctgcgccaaactccaatggagcattcttctcaatggataaatggaaattccggatgatccgatgggcagagagtgcgactgtttttttcaggagctctggttgaatggttttggggactttctgggaggatgctctgcacccagaaaagtagtccaacgggaatcatgagaaaatgggcgactccgtgtgcctccgtcccctcctacttcctcacccacccctccatcagggatcccacgtattccaggatgacacgtgttttagttgtctttgggcgacaactagcggcaaccgttattgaaaatgtaagctgtagagaacaaaaaaactctggtcgcctgttcacagctcactcactgcaacgttgaatcctgggcttaagcaatcctcctgcctcagcttcctgagtagctggaaatataggcatgtgccacaatgctgggcaatatttttaagtagtggtaatctctctcgatgtgttgcccaggttagtctcaaactcctgtcctctatccagcctcccaccttggtcttcagaagtcctgggattacaggcttgagccactgtgctcactcctataatttgatgttttcaacaatactatgtagtgaaatgcatcacgaagacattttgcaaaagaaagctcactatcacatataaagttgtatacttgtcatgtgcttacgtgagcgcatgttcttgcctgtctgaatgttttctgagaactgatcatcttttccccagggacactggttgaagagctgcggggattgtctgggagggtgtctcgggcccggaaacgtaatccaggagagatcagaagaccggcgaccccatgggcctccatctctttctccttccttgacaacccctaaaccagtgaccccactcattccaggctggaacgtcgttcggttgtcatttggcgtcacctagcggtcactgttattgaaaatggaggcatcacaccaaaacttctggccgcccgcgcacagccagggaaaactggtttctctcgggccccaccctgacctcagaggcactccttctgtccctccccctatgccttgttgcctaggaaacctccaccctggctgggaatgcttatttctttatttatttagagacagagacagtttcgctcttgtagcccaggttgaagttcaatggcgccatctcggctcactgcaacctctgcctcctggattcaagcgattctcctgcctcagcctccccactagctggtattacatgtgcctgcctctactcccagcaaatttttgtatttttagtagggacgtcatttcgccatgttggccagtctgttctcgaagtcctgacttcagatgatccacccacctcagcctcttaaagtgctgagtttacagaaataagccagggcgcctaggctatcatttgtttttctttcttccttttttttttttttttttttttttagtaagcatgaacagttctacctgggttttaaaaattgtgtgtgtgaaagaaaaataaatcttgaggcttccaaatcactaaagtaaagggaaaagtcaagctggcaactgtttagggccaacctgccattctattcaaagtcactcctctgctcttttctctttttttttttcttttttgagatggagtctcgctcagatgctcaagctggagcccagtggagcaatctcggctcactgcaacattcgcctcctggtttcaagcgataaatgtatatttgattgcctcctttggagaggctaattagaaactccaaagaatgcaaccatttgtctcttaactacctttgaccaggaagtcccctcctcactttcagtcttcccgcgtttgctaatttgtcccgcctttgcagaccgaaccaatgttcatcttgcatactttgattgatgtctcatgtctccctagaatgtataaaacgataatgttctctgtttaccttaggcacatgtcctcagaacctcctgaggctgtcacgggtatgcgtcctgaaccttggttacgtaaactttctaaattaactgagacctctctcaagttttcagggttcacaacggaaagtgcattgtagctccaccctagggcttaccattaagaaaaactatcctaaatctctgcagatacagtcaaaccggttgtatgtaaactgtatgaaactaaatgcacttattacaagtaaatgaataaatgctgagaaaaaaaatcatgaaccgctcacctttcaaagaagcaataatactatgaattatgtgtaatttccagagtcagctagtttcaaaattgtccccactaaacttggaaaggttccagagtgagctattgtgtctccagcctttgctcctcccccttctttcccctgcgccctcccctcaacctttgccggcaatcacattctctgattctgcaaaagcaggtgggagccctagagagagttctcgttttttttttttttttttttcttttttgagatggagtctcgcttagaggctcaggatggagcccaatggagcaatctcggctcactgcaacatccgcttcctggtttcaggcgattctactgcctcagcctaccgaggagctgggttaacaggcacccgttattatgcccagctaatttttgtattttcatagagacagggtttaaccatgttggccacgctggactcgaactcctgccatcaggtgatccgtcagcctcagcctttcaatgtgccgggattacaggcgtgagccactgtggccagcgagttctcttttctttgtgaagggcaaggcaaagtggaatggattcatctaaaagcggagtgcatgccctggaaaacatcatggttagacccatgtgagacaggttagttttactgcgtgtgttctccatgtgttgttgcccatgtgttgctaccatggtaatcctgctgagtatgagaggaatcaaagtttcacacatttggtgtatgtgcttgactgaggaaccaatggggtgaagctaccatctgtgggattatgactgaacgcctctaaatcagaatcccgcccagaagaaaggatgcagcagcgctggcaagactcggttggcctcagatagccagtccccagcctttgccaccggccggacgctccgccccgctgtgcgccaagaccttgctccggtcttatcatcctaaaaaatggggtgcggccccccatcctaaaaaacggggtgcggccagaaaggcgtttgctccctggcccgtcacataacatgcttatggggaatctgatactaaactattggtaaacgccctgcttctgggtcagggtttcctatggagcagagcaactccctcactgcaacctattgaaagtcagccctccacacaaggggctctcaaccagtgtgcgggaaaactagcgttgtggcgtgtcctgtataattcagccctggacctctaccttccttctttcctccttttgcccccggggacttagttcccgggcctgctcaggccccccgccccggagccccagggcatgcagggctgtctctcgcgagataacattggcgtcggccgtgcatttgggaggggtcgttccccaacagcaggctttccaagatgcagcgctgggggttgcgaggtagggttggcgcccctgctcgatgttccacctctctgattgagcttctttctcccatcccgctgggaattcctccacgagttgggaccggattcttcgagcctcgtgcgaatggctgaggcgcgggtgtcagaggttttgcccctgcagtccctgcctgagtagtgttcgcgcgatgcccgtgggtggctgttggggtcacagtccctctccccgcctcaggggtgctgggatgaaagactagctagtcactacccttgtgtctttactcctcttctctgtccgggtcaaccagcggactgcggggaaatggctggcaggtctgccaagttagacggcctcaaacctgggccggttctgtgtgataaggttccaactgcgtctgatcgcttccctccgcgagcaccacatttggtctttagggtggaccctgtcgattagatgctggcctttggcttcccgatcagcccgcgaatcagccgactgcgggaagcaagcaacatccagttgacacggccgcgggcttctctgtctggaagacctgggaccagggcctaaggccccagtcctcaggtctctggtcgccgtgcccacctgatgtccgcggcaagcgttggacttgaccgtcaacttgggatttctaaggtagaccagataactttggtcagcagcagtaccgcccgcattcactaggtgtcgctttttccttgcgttgtttcttcctctccaactgtttccacagtactttcagtttctcttcgttttgtttttcttttatttttcttgctcctctttctacacactgaagttgctgttgttttacatttaccttttatttatttgtagtttttgaggcaggttggagtgtaagaatgcaatctcggcttacagccgcctcgactttccaggactccctcaggtgatcttcctatctcagccttccaagtggctgagactacaggaatcacttaattctgtgatgtcgaagctgaagtgagccgtgatgatgccttgccctccagtctgagtgtttcagaaggtaagagagacaggttaaagaaaaaaattccttgaaataaactgcaattaactgtgatctaaattaccttttatagtttttcactcccacgagtttgtttattattattgctgcttattatttctttgtattattgtttgtcattattgttattgtttttattatttatgtaattatttagagatggagtcttcctctatcacccagagtgcagtgcagtggcgcgactttgggtcactgcagcttcaaatgcctgggttcaaattcgcaatatggcgaaacaccctgtttactaaaatctgtcaatgacaccttcaggaccgttggttgtggcggctgcaatttcggaggctgaggagggcagttcgctagagctcgggagttcaagacagcctcggaaacagactgcagagcatttgtctgaccaagacccgctgcagcctccacctcccgaccccaagcgatgttctcaactcaggctccaaaggatctgggaccacaggcgcctgccatcataatgcccggatttttttcttttcttttctttttcagtagagacggggtctcactgtgttgccagggctggtctcaaagtcctaggctctagcaattcttccaactcagcctcccaaagtgctgggattataggtgtgagccacaatgccctgccctcttttttatttccttcattttttctctttttttctttctctttctttctgtcttttctttttcttctctctttttcttcctcccttttttctctcatttctcattctttttttttctgtttctatgtcttttggttttctttttcatctttcttccctttacatctctgtctgtctattttctttttcttgatcttccttactctctctctcttttcttcatttctttctttccatccctctgtctgtctgtctttgtgtggattttggaaaattctccttattctgtatctccctgtgtatcacaagcctctgtgactttcactttgttgtttttcctccttgtcgcgtaaaaggcattcactgctcttttattttgatgctctgtggatgttcgaagggtggggaaaaagtggtccacgaatgtgattggtttcatgagagacacgagagacaaaagaacatatgatgattacttcgctaaatgccctgtttattctttcaactgcactcatacaagtaaggacgcagttggtgggttgagagatctctgtgtagtcatgactctgcaattatacttgacgagagcggtgatgatgaacgggcggcatggaaacctgcccttctttggtgtcagttgagcacagtgagaagagattcacaatggcctgtatctcaacctgatggtactgtgtttctgctctgatctttaggaatgagagaagcattcccgtgcattcctgcaacgtccttgaagttttctttttaaacttttcgattaactaacgtatttattaatttatttgagatggagtcttgttctgttggtcaggccatggcgcagtatcgggccactgcaacctccgcctcccaggttccagcgattctcttgccttagcctctcgagtagctgggataacaggcacgtgccaccatacccagctaacttttacctttttagtaaagacagggttttcccatgttgcccaggctggtcttgaactccaacttccaggaatcctgtggcctcgtcctcccaaagtgctgggagatcccaggtcatcagactcgagaaagaatgttggttgatatagaaaggcgagacacactgcgcccgacccaaattgctatttttaaaaataaaccagtaggctgggtgcagtgggccactcctctcatctcagcagtttgctaggcggatgtgggaggattacgaggtcaggagtttgagaccagcctggccaacatagtcaaactctgtctgtatgaagaatacaaaaattaaccaggtgtggtgtcacacacctctactcccagctactctatatgctgaggtagtagaatctgttgaagccgggagatggagattgcagtcagcccagatcatgccactggactccagcttgggtgacagagtcagattccatctaaaaaaaaaaaaagtaattaaaaataagtgagtttccaagaagaaatagaaacccgcagtgacacaaacatatgcatctcacctttcgaggcagcaatgacactacaaacttgtaaactcagttcatttcttgactgcggaccatgggtatttgtgatgcttcctcttggaacatagttctgtgtgacaccatacccagctaacatttgcctttttagtagtcagaattttgctatattgcccagactgctcttgaactcatgaactccaggtatccgcccgcccaaaaaaaagagttgtgatgaaaggagacacacagatggatttcagcccttaaaatggtgcatgctgccacatttcacagatcttccctgggccttactggtatttgcccaacatagaaatgctttctaaaaagtgacaatttgcttacataatatttccacaagcgatgccttggtctgtgtttgtttttacgttttgttttgtttgtagtttttactttacttatctcttttcagttgaagtagattttaccaattttaggaagatgtgtattttccccaaaacctgttagctggtgttttcttcggtcattaagtagcgattttcggaatctctcaaggtacagtgagagccgattggtataaactatacttcataaaatcttctttccttttcatttttttttttttttttttgtctttcaggtggagtttcgctcttattgcccaggctggagttcagtggcgtgacctcagctcaccgcaacctctgccgcctgtgttcaagagattttccagtcttcaccctttcgagtagctgaaaccacaggcaaacacctccaggcctggctaattttttttttttcatagagactaggtagctccataatggtcaggctggtctagaacacccaacctgaggcgtaccacccaacttgaccacccaaagtgctgagattaaaggcgtgagctccgcgtctggccataacatcttatcctatagaagcccagagaggttaggtatgtagtccctgagaccagccttccttggatgaactccaaagtgatggctgaggattagggagtgtggggtgggggctggaaagtcggtcccctattgttgctacctaggccatgacatccccagactcccatcgcctgctcaccgtttgagattcccccccaccaccgccttggtggctgaactcttactttaatttctgtctttcttcgtttgttgggtttcaggagggggtgcaggaaagacggtgtgcgtggggagggggtgtagggtggggatggaggggagcgtcctaagggtcgatgtagtgtcatgcctctttcatcaccaccaccgaagatgaaacaataatcatctaaataccgcgtgttctcacacataagtgggaactacataatgagaatgcatgcgaagaactagggggacgagagacgcaggagcctacctgagggaggacgtgtggaaggacagacagcttcaggacaaagcaaaacgagcagaacacaaaaactgtaggggactgcgctgagaatccgggtgaggaaatcatcggcacactgaaccccctactcagaagtttacctatgaaacaatcttgcacatgtatgcttcaaaaacaaataacagttagggaagaaagagagagagagagaaagagagagagacaagtaaaataaagcaccacctccttgacctgactcagggcgtttggggtcttctggggaaatgttctgaaacaatggagtattttggtctgttctttcttgtgtctttttttttttttttaagacggactctcgctcagccacccaggctggaatgcagtggtgcactgggttcactgcagcaaatatctcccgggttgaagcgattctccagtctcatcctcctgagtggccgggattacagtcacgcgccataatgccctgctaatttttgaacattagtagagaaggggtattgccatgcttgcgacgctggacttgaaggcaaaatgaaaatgaaaatgaaacgcaacaaaataattaaaagtgagtttctggggaaaaagaagaaaagaaaaaagaaaaaaacaacaaaacagaacaaccccaccgtgacgtacacatacgcctctcgcctttcgaggcctcaaacacgttaggaattatgcgtgatttctttttttaacttcattttatgttattatcgtgattgatgtttcgagacggagtctcggaggcccgccctccctggttgcccagacaaccccgggagacagaccctggctgggcccgattgttcttctccttggtcaggggtttccttgtctttcttcgtgtctttaacccgcgtggactcttccgctcgggtttgacagatggcagctccactttaggccttgttgttgttggggactttcctgattctccccagatgtagtgaaagcaggtagatttgccttgcctggccttgcctggccttgccttttctttctttctttctttctttattactttctctttttcttcttcttcttcttcttttttttgagacagagtttcactcttgttgcccaggctagagggcaatggcgcgatctcggctcaccgcaccctccgcctcccaggttcaagcgattctcctgcctcagcctcctgattagctgggattacaggcatgggccaccgtgcctggctgatgtttgtacttttagtagagacggtgtttttccatgttggtcaggctggtctcccactcccaacctcaggtggtccgcctgccttagcctcccaaagtgctgggatgacaggcgtgagccaccgcgcccagcctctctctctctctctctctctctctctctctcgctcgcttgcttgcttgctttcgtgctttcttcctttcccgttttctttctttctttctttctttcgtttctttcatgcttgctttcttgcttgcttgcttgctttcgtgctttcttgctttcctgttttctttctttctttctttcttttgtttctttcttgcttgctttcttgcttgcttgcttgctttcgtgctttcttgctttcctgttttctttctttctttctttcttttctttctttcttgcttgctttcctgcttgcttgctttcgtgctttcttgttttctcgatttctttctttcttttgtttctttcctgcttgctttcttgcttgcttgctttcgtgctttcttgctttcctgttttctttctttctttctttcttttgtttctttcttgcttgctttcttgcttgcttgctttcgtgctttcttgttttctcgatttctttctttcttttgtttctttcctgcttgctttcttgcttgattgctttcgtgctttcttgctttcttgttttctttctttcttttgtttctttctttcttgcttccttgttttcttgctttcttgcttgcttgctttcgtgctttcttgttttcttgctttctttcttttgtttctttcttgcttgctttcttgcttccttgttttcttgctttcttgcttgcttgctttcgtgctttcttgctttcttttctttctttcttttctttttctttctttctttctttcttgctttcttttctttcattcattccttctttcttttctttctttcttccttccttccttccttccttcctttctttctttctttctgtttcgtccttttgagacagagtttcactcttgtttccacggctagagtgcaatggcgcggtcttggctcaccgcaccttccgcctcccgggttcgagcgcttctcctgcctcagcctcccgattagcggggattacagggaggcacccccacgcctggcttggctgatgtttgtgtttttagtaggcacgccgtgtctctccatgttgctcaggctggtctccaactcccgacctcctgtgatgcgcccacctcggcctctcgaagtgctgggatgacgggcgtgagccaccgtgcccggcctgttgactcatttcgcttttttatttctttcgtttccacgcgtttacttatatgtattaatgtaaacgtttctgtacgcttatatgcaaacaacgacaacgtgtatctctgcattgaatactcttgcgtatggtaaatacgtatcggttgtatggaaatagacttctgtatgatagatgtaggtgtctgtgttatacaaataaatacacatcgctctataaagaagggatcgtcgataaagacgtttattttacgtatgaaaagcgtcgtatttatgtgtgtaaatgaacgagcgtacgtagttatctctgttttctttcttcctctccttcgtgtttttcttccttcctttcttcctttctctccttctttaggtttttcttcctctcttcctttccttctttctctctttctgtccttttttccttcgtgctttatttctctttcgttccctgtgtttccttcttttttctttcctctctgtttctttttcccttctttccttcgtttctttcctcattctttctctctttttcgtgtttctttccttcccgtctgtcttttaaaaaatggagtgtttcagaagtttactttgtgtatctacgttttctaaattgtctctcttttctccattgtcttcctccctccctccctccctccctccctgctcccttccctccctccttccctttcgccatctgtctcttttccccactcccctccccccgtctgtctctgcgtggattccggaagagcctacgcattctgcctctccgtgtgtctgcagcgacccgcgaccgagtccttgtgtgttctttctccctccctccctccctccctccctccctccctgcttccgagaggcatctccaaacacccacgcgccgtgggttgtcttctgactctgtcgcggtcgaggcagagacgcgttttgggcaccgtttgtgtggggttggggcagaggggctgcgttttcggcctcgggaagagcttctcgactcacggtttcgctttcgcggtccacgggccgccctgccagccggatctgtctcgctgacgtccgcggcggttgtcgggctccatctggcggccgctttgagatcgtgctctcggcttccggagctgcggtggcagctgccgagggaggggaccgtccccgctgtgagctaggcagagctccggaaagcccgcggtcgtcagcccggctggcccggtggcgccagagctgtggcgcgtcgcttgtgagtcacagctctggcgtgcaggtttatgtgggggagaggctgtcgctgcgcttctgggcccgcggcgggcgtggggctgcccgggccggtcgaccagcgcgccgtagctcccgaggcccgagccgcgacccgcggggacccgccgcgcgtggcgcgggaggctggggacgcccttcccggcccggtcgcgggtccgcgctcatcctggccgtctgaggcggcggccgaattcgtttccgagtccccgtggggagccggggaccgtcccgcccccgtcccccgggtgccggggagcggtccctctgccgcgatcctttctggcgagtccccgtgcggagtcggagagcgctccctgagcgcgcgtgcggcccgagaggtcgcgcctggccggccttcggtccctcgtgtgtcccggtcgtaggaggggccggccgaaaatgcttccggctcccgctctggagacacgggccggccccctgcgtgtggcacgggcggccgggagggcgtccccggcccggcgctgctcccgcgtgtgtcctggggttgaccagagggccccgggcgctccgtgtgtggctgcgatggtggcgtttttggggacaggtgtccgtgtcgcgcgtcgcctgggccggcggcgtggtcggtgacgcgacctcccggccccgggggaggtatatctttcgctccgagtcggcattttgggccgccgggttattgctgacacgctgtcctctggcgacctgtcgctggagaggttgggcctccggatgcgcgcggggctctggcctaccggtgacccggctagccggccgcgctcctgcttgagccgcctgccggggcccgcgggcctgctgttctctcgcgcgtccgagcgtcccgactcccggtgccggcccgggtccgggtctctgacccacccgggggcggcggggaaggcggcgagggccaccgtgcccccgtgcgctctccgctgcgggcgcccggggcggccgcgacaaccccaccccgctggctccgtgccgtgcgtgtcaggcgttctcgtctccgcggggttgtccgccgccccttccccggagtggggggttggccggagccgatcggctcgctggccggccggccggcctccgctcccggggggctcttcgtgatcgatgtggtgacgtcgtgctctcccgggccgggtccgagccgcgacgggcgaggggcggacgttcgtggcgaacgggaccgtccttctcgctccgccccgcgggggtcccctcgtctctcctctccccgcccgccggcggtgcgtgtgggaaggcgtggggtgcggaccccggcccgacctcgccgtcccgcccgccgccttctgcgtcgcgggtgcgggccggcggggtcctctgacgcggcagacagccctcgctgtcgcctccagtggttgtcgacttgcgggcggcccccctccgcggcggtgggggtgccgtcccgccggcccgtcgtgctgccctctcggggggtttgcgcgagcgtcggctccgcctgggcccttgcggtgctcctggagcgctccgggttgtccctcaggtgcccgaggccgaacggtggtgtgtcgttcccgcccccggcgccccctcctccggtcgccgccgcggtgtccgcgcgtgggtcctgagggagctcgtcggtgtggggttcggggcggtttgagtgagacgagacgagacgcgcccctcccacgcggggaagggcgcccgcctgctctcggtgagcgcacgtcccgtgctcccctctggcgggtgcgcgcgggccgtgtgagcgatcgcggtgggttcgggccggtgtgacgcgtgcgccggccggccgccgaggggctgccgttctgcctccgaccggtcgtgtgtgggttgacttcggaggcgctctgcctcggaaggaaggaggtgggtggacgggggggcctggtggggttgcgcgcacgcgcgcaccggccgggcccccgccctgaacgcgaacgctcgaggtggccgcgcgcaggtgtttcctcgtaccgcagggccccctcccttccccaggcgtccctcggcgcctctgcgggcccgaggaggagcggctggcgggtggggggagtgtgacccaccctcggtgagaaaagccttctctagcgatctgagaggcgtgccttgggggtaccggatcccccgggccgccgcctctgtctctgcctccgttatggtagcgctgccgtagcgacccgctcgcagaggaccctcctccgcttccccctcgacggggttgggggggagaagcgagggttccgccggccaccgcggtggtggccgagtgcggctcgtcgcctactgtggcccgcgcctcccccttccgagtcgggggaggatcccgccgggccgggcccggcgtcccagcgggttgggacgcggcggccggcgggcggtgggtgtgcgcgcccggcgctctgtccggcgcgtgactccctccgccgcgagtcggctctccgcccgctcccgtgccgagtcgtgaccggtgccgacgaccgcgtttgcgtggcacggggtcgggcccgcctggccctgggaaagcgtcccacggtgggggcgcgccggtctcccggagcgggaccgggtcggaggatggacgagaatcacgagcgacggtggtggtggcgtgtcgggttcgtggctgcggtcgctccggggcccccggtggcggggccccggggctcgcgaggcggttctcggtgggggccgagggccgtccggcgtcccaggcggggcgccgcgggaccgccctcgtgtctgtggcggtgggatcccgcggccgtgttttcctggtggcccggccgtgcctgaggtttctcccggagccgccgcctctgcgggctcccgggtgcccttgccctcgcggtccccggccctcgcccgtctgtgccctcttccccgcccgccgcccgccgatcctcttcttccccccgagcggctcaccggcttcacgtccgttggtggccccgcctgggaccgaacccggcaccgcctcgtggggcgccgccgccggccactgatcggcccggcgtccgcgtcccccggcgcgcgccttggggaccgggtcggtggcgccccgcgtggggcccggtgggcttcccggagggttccgggggtcggcctgcggcgcgtgcgggggaggagacggttccgggggaccggccgcgactgcggcggcggtggtggggggagccgcggggatcgccgagggccggtcggccgccccgggtgccgcgcggtgccgccggcggcggtgaggccccgcgcgtgtgtcccggctgcggtcggccgcgctcgaggggtccccgtggcgtccccttccccgccggccgcctttctcgcgccttccccgtcgccccggcctcgcccgtggtctctcgtcttctcccggcccgctcttccgaaccgggtcggcgcgtcccccgggtgcgcctcgcttcccgggcctgccgcggcccttccccgaggcgtccgtcccgggcgtcggcgtcggggagagcccgtcctccccgcgtggcgtcgccccgttcggcgcgcgcgtgcgcccgagcgcggcccggtggtccctcccggacaggcgttcgtgcgacgtgtggcgtgggtcgacctccgccttgccggtcgctcgccctctccccgggtcggggggtggggcccgggccggggcctcggccccggtcgcggtcccccgtcccgggcgggggcgggcgcgccggccggcctcggtcgccctcccttggccgtcgtgtggcgtgtgccacccctgcgcccgcgcccgccggcggggctcggagccgggcttcggccggccccgggccctcgaccggaccggtgcgcgggcgctgcggccgcacggcgcgactgtccccgggccgggcaccgcggtccgcctctcgctcgccgcccggacgtcggggcgccgcggggcggcggagcgccgtccccgcctcgcgcgcccgcgggcgccggggcgcgcgcgcgtggccgccggtccctcccggccgccgggcgcgggtcgggccgtccgcctcctcgcgggcgggccgacgaagaagcgtcgcgggtctgtggcgcggggccccggtggtcgtgtcgcgtggggggcgggtggttggggcgtccggttcccgcgccccgccccggccccaccggtcccggccgccgcccccgcgcccgctcgctccctcccgtccgcccgtccgcggcccgtccgtccgtccgtccgtcgtcctcctcgcttgcggggcgccgggcccgtcctcgcgaggccccccggccggccgtccggccgcgtcggggcctcgccgcgctctaccttacctacctggttgatcctgccagtagcatatgcttgtctcaaagattaagccatgcatgtctaagtacgcacggccggtacagtgaaactgcgaatggctcattaaatcagttatggttcctttggtcgctcgctcctctcctacttggataactgtggtaattctagagctaatacatgccgacgggcgctgacccccttcgcgggggggatgcgtgcatttatcagatcaaaaccaacccggtcagcccctctccggccccggccggggggcgggcgccggcggctttggtgactctagataacctcgggccgatcgcacgccccccgtggcggcgacgacccattcgaacgtctgccctatcaactttcgatggtagtcgccgtgcctaccatggtgaccacgggtgacggggaatcagggttcgattccggagagggagcctgagaaacggctaccacatccaaggaaggcagcaggcgcgcaaattacccactcccgacccggggaggtagtgacgaaaaataacaatacaggactctttcgaggccctgtaattggaatgagtccactttaaatcctttaacgaggatccattggagggcaagtctggtgccagcagccgcggtaattccagctccaatagcgtatattaaagttgctgcagttaaaaagctcgtagttggatcttgggagcgggcgggcggtccgccgcgaggcgagccaccgcccgtccccgccccttgcctctcggcgccccctcgatgctcttagctgagtgtcccgcggggcccgaagcgtttactttgaaaaaattagagtgttcaaagcaggcccgagccgcctggataccgcagctaggaataatggaataggaccgcggttctattttgttggttttcggaactgaggccatgattaagagggacggccgggggcattcgtattgcgccgctagaggtgaaattcttggaccggcgcaagacggaccagagcgaaagcatttgccaagaatgttttcattaatcaagaacgaaagtcggaggttcgaagacgatcagataccgtcgtagttccgaccataaacgatgccgaccggcgatgcggcggcgttattcccatgacccgccgggcagcttccgggaaaccaaagtctttgggttccggggggagtatggttgcaaagctgaaacttaaaggaattgacggaagggcaccaccaggagtggagcctgcggcttaatttgactcaacacgggaaacctcacccggcccggacacggacaggattgacagattgatagctctttctcgattccgtgggtggtggtgcatggccgttcttagttggtggagcgatttgtctggttaattccgataacgaacgagactctggcatgctaactagttacgcgacccccgagcggtcggcgtcccccaacttcttagagggacaagtggcgttcagccacccgagattgagcaataacaggtctgtgatgcccttagatgtccggggctgcacgcgcgctacactgactggctcagcgtgtgcctaccctacgccggcaggcgcgggtaacccgttgaaccccattcgtgatggggatcggggattgcaattattccccatgaacgaggaattcccagtaagtgcgggtcataagcttgcgttgattaagtccctgccctttgtacacaccgcccgtcgctactaccgattggatggtttagtgaggccctcggatcggccccgccggggtcggcccacggccctggcggagcgctgagaagacggtcgaacttgactatctagaggaagtaaaagtcgtaacaaggtttccgtaggtgaacctgcggaaggatcattaacggagcccggagggcgaggcccgcggcggcgccgccgccgcgcgcttccctccgcacacccacccccccaccgcgacgcggcgcgtgcgcgggcggggcccgcgtgcccgttcgttcgctcgctcgttcgttcgccgcccggccccgccggccgcgagagccggagaactcgggagggagacgggggagagagagagagagagagaaagagaaagaagggcgtgtcgttggtgtgcgcgtgtcgtggggccggcgggcggcggggagcggtccccggcagcggccccgacggcgtgggtgtcggcgggcgcgggggcggttctcggcggcgtcgcggcgggtctgggggtctcggtgccctcctccccgccggggcccgtcgtccggccccgccgcgccggctccccgtcttcggggccggccggattcccgtcgcctccgccgcgccgctccgcgccgccgggcacggccccgctcgctctccccggccttcccgctagggcgtctcgagggtcgggggccggacgccggtcccctcccccgcctcctcgtccgcccccccgccgtccaggtacctagcgcgttccggcgcggaggtttaaagaccccttggggggatcgcccgtccgcccgtgggtcgggggcggtggtgggcccgcgggggagtcccgtcgggaggggcccggcccctcccgcgcctccaccgcggactccgctccccggccggggccgcgccgccgccgccgccgcggcggccgtcgggtgggggctttacccggcggccgtcgcgcgcctgccgcgcgtgtggcgtgcgccccgcgccgtgggggcgggaacccccgggcgcctgtggggtggtgtccgcgctcgcccccgcgtgggcggcgcgcgcctccccgtggtgtgaaaccttccgacccctctccggagtccggtcccgtttgctgtctcgtctggccggcctgaggcaaccccctctcctcttgggggggggcggggggacgtgccgcgccaggaagggcctcctcccggtgcgtcgtcgggagcgccctcgccaaatcgacctcgtacgactcttagcggtggatcactcggctcgtgcgtcgatgaagaacgcagctagctgcgagaattaatgtgaattgcaggacacattgatcatcgacacttcgaacgcacttgcggccccgggttcctcccggggctacgcctgtctgagcgtcgcttgccgatcaatcgcccccgggggtgcctccgggctcctcggggtgcgcggctgggggttccctcgcagggcccgccgggggccctccgtccccctaagcgcagacccggcggcgtccgccctcctcttgccgccgcgcccgccccttccccctccccccgcgggccctgcgtggtcacgcgtcgggtggcgggggggagaggggggcgcgcccggctgagagagacggggagggcggcgccgccgccgcccgcgaagacggagagggaaagagagagccggctcgggccgagttcccgtggccgccgcctgcggtccgggttcctccctcggggggctccctcgcgccgcgcgcggctcggggttcggggttcgtcggccccggccgggtggaaggtcccgtgcccgtcgtcgtcgtcgtcgcgcgtcgtcggcggtgggggcgtgttgcgtgcggtgtggtggtgggggaggaggaaggcgggtccggaaggggaagggtgccggcggggagagagggtcgggggagcgcgtcccggtcgccgcggttcgccgcccgcccccggtggcggcccggcgtccggccgaccgccgctcccgcgcccctcctcctcccccgccgcccctcctccgaggccccgcccgtcctcctcgccctccccgcgcgtacgcgcgcgcgcccgcccgcccggctcgcctcgcggcgcgtcggccggggccgggagcccgccccgcggcccgcccggccgcgcccgtggccgcggcgccggggttcgcgtgtccccggcggcgacccgcgggacgccgcggtgtcgtccgccgtcgcgcgcccgcctccggctcggccgcgccgcgccgcgccggggccccgtcccgacttccgcgtcggggcggcggcggcgccgcgtcctcggacccgtccccccgacctccgcgggggagacgggtcggggcgtgcggcgcccgtcccgcccccggcccgtgcccctccctccggtcgtcccgctccggcggggcggcgcgggggtgccctcggccgcggctctctctcccgtcgcctctccccctcgccgggcccgtctcccgacggagcgtcgggcgggcggtcgggccggcgcgattccgtccgtccgtccgccgagcggcccgtccccctccgagacgcgacctcagatcagacgtggcgacccgctgaatttaagcatattagtcagcggaggaaaagaaactaaccaggattccctcagtaacggcgagtgaacagggaagagcccagcgccgaatccccgccccgcggcggggcgcgggacatgtggcgtacggaagacccgctccccggcgccgctcgtggggggcccaagtccttctgatcgaggcccagcccgtggacggtgtgaggccggtagcggcccccggcgcgccgggcccgggtcttcccggagtcgggttgcttgggaatgcagcccaaagcgggtggtaaactccatctaaggctaaataccggcacgagaccgatagtcaacaagtaccgtaagggaaagttgaaaagaactttgaagagagagttcaagagggcgtgaaaccgttaagaggtaaacgggtggggtccgcgcagtccgcccggaggattcaacccggcggcgggtccggccgtgtcggcggcccggcggatctttcccgccccccgttcctcccgacccctccacccgccctcccttcccccgccgcccctcctcctcctccccggagggggcgggctccggcgggtgcgggggtgggcgggcggggccgggggtggggtcggcgggggaccgtcccccgaccggcgaccggccgccgccgggcgcatttccaccgcggcggtgcgccgcgaccggctccgggacggctgggaaggcccggcggggaaggtggctcggggggccccgtccgtccgtccgtccgtcctcctcctcccccgtctccgccccccggccccgcgtcctccctcgggagggcgcgcgggtcggggcggcggcggcggtggcggcggcggcggcggcggcgggaccgaaaccccccccgagtgttacagcccccccggcagcagcactcgccgaatcccggggccgagggagcgagacccgtcgccgcgctctcccccctcccggcgcccacccccgcggggaatcccccgcgaggggggtctcccccgcgggggcgcgccggcgtctcctcgtgggggggccgggccacccctcccacggcgcgaccgctctcccacccctcctccccgcgcccccgccccggcgacggggggggtgccgcgcgcgggtcggggggcggggcggactgtccccagtgcgccccgggcgggtcgcgccgtcgggcccggggggaggttctctcggggccacgcgcgcgtcccccgaagagggggacggcggagcgagcgcacggggtcggcggcgacgtcggctacccacccgacccgtcttgaaacacggaccaaggagtctaacacgtgcgcgagtcgggggctcgcacgaaagccgccgtggcgcaatgaaggtgaaggccggcgcgctcgccggccgaggtgggatcccgaggcctctccagtccgccgagggcgcaccaccggcccgtctcgcccgccgcgccggggaggtggagcacgagcgcacgtgttaggacccgaaagatggtgaactatgcctgggcagggcgaagccagaggaaactctggtggaggtccgtagcggtcctgacgtgcaaatcggtcgtccgacctgggtataggggcgaaagactaatcgaaccatctagtagctggttccctccgaagtttccctcaggatagctggcgctctcgcagacccgacgcacccccgccacgcagttttatccggtaaagcgaatgattagaggtcttggggccgaaacgatctcaacctattctcaaactttaaatgggtaagaagcccggctcgctggcgtggagccgggcgtggaatgcgagtgcctagtgggccacttttggtaagcagaactggcgctgcgggatgaaccgaacgccgggttaaggcgcccgatgccgacgctcatcagaccccagaaaaggtgttggttgatatagacagcaggacggtggccatggaagtcggaatccgctaaggagtgtgtaacaactcacctgccgaatcaactagccctgaaaatggatggcgctggagcgtcgggcccatacccggccgtcgccggcagtcgagagtggacgggagcggcgggggcggcgcgcgcgcgcgcgcgtgtggtgtgcgtcggagggcggcggcggcggcgggggtgtgtggggtcctcccccgccccccccccacgcctcctcccctcctcccgcccacgccccgctccccgcccccggagccccgcggacgctacgccgcgacgagtaggagggccgctgcggtgagccttgaagcctagggcgcgggcccgggtggagccgccgcaggtgcagatcttggtggtagtagcaaatattcaaacgagaactttgaaggccgaagtggagaagggttccatgtgaacagcagttgaacatgggtcagtcggtcctgagagatgggcgagcgccgttctgaagggacgggcgatggcctccgttgccctcggccgatcgaaagggagtcgggttcagatccccgaatccggagtggcggagatgggcgccgcgaggcgtccagtgcggtaacgcgaccgatcccggagaagccggcgggagccccggggagagttctcttttctttgtgaagggcagggcgccctggaatgggttcgccccgagagaggggcccgtgccttggaaagcgtcgcggttccggcggcgtccggtgagctctcgctggcccttgaaaatccgggggagagggtgtaaatctcgcgccgggccgtacccatatccgcagcaggtctccaaggtgaacagcctctggcatgttggaacaatgtaggtaagggaagtcggcaagccggatccgtaacttcgggataaggattggctctaagggctgggtcggtcgggctggggcgcgaagcggggctgggcgcgcgccgcggctggacgaggcgccgccgccccccccacgcccggggcacccccctcgcggccctcccccgccccaccccgcgcgcgccgctcgctccctccccaccccgcgccctctctctctctctctcccccgctccccgtcctcccccctccccgggggagcgccgcgtgggggcggcggcggggggagaagggtcggggcggcaggggccggcggcggccgccgcggggccccggcggcgggggcacggtcccccgcgaggggggcccgggcacccggggggccggcggcggcggcgactctggacgcgagccgggcccttcccgtggatcgccccagctgcggcgggcgtcgcggccgcccccggggagcccggcgggcgccggcgcgnccccccccccaccccacgtctcgtcgcgcgcgcgtccgctgggggcggggagcggtcgggcggcggcggtcggcgggcggcggggcggggcggttcgtccccccgccctacccccccggccccgtccgccccccgttcccccctcctcctcggcgcgcggcggcggcggcgggcggcggaggggccgcgggccggtcccccccgccgggtccgcccccggggccgcggttccgcgcggcgcctcgcctcggccggcgcctagcagccgacttagaactggtgcggaccaggggaatccgactgtttaattaaaacaaagcatcgcgaaggcccgcggcgggtgttgacgcgatgtgatttctgcccagtgctctgaatgtcaaagtgaagaaattcaatgaagcgcgggtaaacggcgggagtaactatgactctcttaaggtagccaaatgcctcgtcatctaattagtgacgcgcatgaatggatgaacgagattcccactgtccctacctactatccagcgaaaccacagccaagggaacgggcttggcggaatcagcggggaaagaagaccctgttgagcttgactctagtctggcacggtgaagagacatgagaggtgtagaataagtgggaggcccccggcgcccccccggtgtccccgcgaggggcccggggcggggtccgccggccctgcgggccgccggtgaaataccactactctgatcgttttttcactgacccggtgaggcgggggggcgagccccgaggggctctcgcttctggcgccaagcgcccggccgcgcgccggccgggcgcgacccgctccggggacagtgccaggtggggagtttgactggggcggtacacctgtcaaacggtaacgcaggtgtcctaaggcgagctcagggaggacagaaacctcccgtggagcagaagggcaaaagctcgcttgatcttgattttcagtacgaatacagaccgtgaaagcggggcctcacgatccttctgaccttttgggttttaagcaggaggtgtcagaaaagttaccacagggataactggcttgtggcggccaagcgttcatagcgacgtcgctttttgatccttcgatgtcggctcttcctatcattgtgaagcagaattcaccaagcgttggattgttcacccactaatagggaacgtgagctgggtttagaccgtcgtgagacaggttagttttaccctactgatgatgtgttgttgccatggtaatcctgctcagtacgagaggaaccgcaggttcagacatttggtgtatgtgcttggctgaggagccaatggggcgaagctaccatctgtgggattatgactgaacgcctctaagtcagaatcccgcccaggcggaacgatacggcagcgccgcggagcctcggttggcctcggatagccggtcccccgcctgtccccgccggcgggccgcccccccctccacgcgccccgcgcgcgcgggagggcgcgtgccccgccgcgcgccgggaccggggtccggtgcggagtgcccttcgtcctgggaaacggggcgcggctggaaaggcggccgccccctcgcccgtcacgcaccgcacgttcgtggggaacctggcgctaaaccattcgtagacgacctgcttctgggtcggggtttcgtacgtagcagagcagctccctcgctgcgatctattgaaagtcagccctcgacacaagggtttgtccgcgcgcgcgcgcgcgcgtgcgtgcggggggcccggcggggcgtgcgcgtccggcgccgtccgtccttccgttcgtcttcctccctcccggcctctcccgccgaccgcgggcgtggtggtgggggtgggggggagggcgcgcgaccccggtcggcgcgccccgcttcttcggttcccgcctcctccccgttcaccgccggggcggctcgtccgctccgggccgggacggggtccggggagcgtggtttgggagccgcggaggcggccgcgccgagccgggcccgtggcccgccggtccccgtcccgggggttggccgcgcgggccccggtggggcggccacccggggtcccggccctcgcgcgtccttcctcctcgctcctccgcacgggtcgaccagcagaccgcgggtggtgggcggcgggcggcgaggccccacggggcgtccgcgcacccggccgacctccgctcgtgacctctcctcggtcgggcctccggggtcgaccgcctgccgcccgcgggcgtgagactcagccggcgtctcgccgtgtcccgggtcgaccggcgggccttctccaccgagcggcgtgtaggagtgcccgtcgggacgaaccgcaaccggagcgtccccgtctcggtcggcacctccggggtcgaccagctgccgcccgcgagctccggacttagccggcgcctgcacgtgtcccgggtcgaccagcaggcggccgccggacgctgcggcgcaccgacgcgagggcgtcgattcccgttcgcgcgcccgcgacctccaccggcctcggcccgcggtggagctgggaccacgcggaactccctctctcacatttttttcagccccaccgcgagtttgcgtccgcgggacttttaagagggagtcactgctgccgtcagccagtaatgcttcctccttttttgcttttaggttttgtcttgccttttttttttttttctttctttctttctttctttctttttctttctttctttctttctttctcgctctcgctctctccctccctcgctcgttttctctctctctcgctcttgccctctcgctctctccctcgctcgttttctctctctctctctctctctctctctctgtctctcgctctcgccctctctctctctctgtctctctgtctctctctctctctctctctctctctctctctctctgtcgctctcgccctctcgctctctctctgtctctgtctgtgtctctctctctccctccctccctccctccctccctccctccctccctccctccctccccttccttggtgccttctcggctcttgagacttagccgctgtctcgccgtgccccgggtcgaccggcgggccttctccaccgagcggcgtgtaagagtgcccgtcgggacgagccggacccgccgcgtccccgtctcggtcggcacctccggggtcgaccagctgccgcccgcgagctccggacttagccggcgtctgcacgtgtcccgggtcgaccagcaggcggccgccggacgctgcggcgcaccgacgcgagggcgctgattcccgttcacgcgcccgcgacctccaccggcctcggcccgccgtggagctgggaccacgcggaactccctctcctacatttttttcagccccaccgcgagtttgcgtccgcgggacttttaagagggagtcactgctgccgtcagccagtaatgcttcctccttttttgcttttaggttttgtcttgccttttttttttttttttttttttctttctttctttctttctttctttctttctttctttctttctttctttctcgctctcgctctctcgctctctccctcgctcgttttctttctctttctctttctctctctctctctctctctctctctgtctctcgctctcgccctctctctctctctctttctctctgtctctctctgtctctctctctctctctctctctctctctctctctctctctctctctctctctccctccccctccctccctctctccccttccttggtgccttctcggctcttgacacttagccgctgtctcgccgtgtcccgggtcgaccggcgggccttctccaccgagcggcgtgtaagagtgcccgtcgggacgagccggacccgccgcgtccccgtctcggtcggcacctccggggtcgaccagctgccgcccgcgagctccggacttagctggcgtctgcacgtgtcccgggtcgaccagcaggcggccgccggacgctgcggcgcaccgacgcgagggcgtcgattccggttcacgcgccggcgacctccaccggcctcggcccgcggtggagctgggaccacgcggaactccctcttctacatttttttcagccccactgcgagtttgcgtccgcgggacttttaagagggagtcactgctgccgtcagccagtaatgcttcctccttttttgctttttggttttgccttgcgttttctttctttctttctttctttctttctttctttcttttctttctttctttctttctttctttctttctctctctctctctctctctctgtctctctcccctccctccctccttggtgccttctcggctcgctgctgctgctgcctctgcctccacggttcaagcaaacagcaagttttctatttcgagtaaagacgtaatttcaccattttggccgggctggtctcgaactcccgacctagtgatccgcccgcctcggcctcccaaagactgctgggagtacagatgtgagccaccatgcccggccgattccttccttttttcaatcttattttctgaacgctgccgtgtatgaacatacatctacacatacacacacacacacacacacacacacacacacacacacacacacacacacacacaccccccgtagtgataaaactatgtaaatgatatttccataattaatacgtttatattatgttacttttaatggatgaatatgtatcgaagccccatttcatttacatacacgtgtatgtatatccttcctcccttccttcattcattatttattaataattttcgtttatttattttcttttcttttggggccggcccgcctggtcttctgtctctgcgctctggtgacctcagcctcccaaatagctgggactacagggatctcttaagcccgggagggagaggttaacgtgggctgtgatcgcacacttccactccagcttacgtgggctgcggtggggtggggtgcagagaaaacgattgattgcgatctcaattgccttttagcttcattcataccctgttatttgctcgtttattctcatgggttcttctgtgtcattgtcacgttcatcgtttgcttgcctgcttgcctgtttatttccttccttccttccttccttccttccttccttccttccctccttccttccttccttccctcccttactggcagggtcttcctctgtctctgccgcccaggatcaccccaacctcaacgctttggaccgaccaaacggtcgttctgcctctgatccctcccatccccattacctgagactacaggcgcgcaccaccacaccggctgacttttatgttgtttctcatgttttccgtaggtaggtgtgtgtgtgtgtgtgtgtgtgtgtgtgtgtgtgtgtgtgtgtgtgtgtgtgtgtatctatgtatgtacgtatgtatgtatgtatgtgagtgagatgggtttcggggttctatcatgttgcccacgctggtctcgaactcctgtcctcaagcaatccgcctgcctgcctcggccgcccacactgctgctattacaggcgtgagacgctgcgcctggctccttctacatttgcctgcctgcctgcctgcctgcctgcctgcctgcctgcctgcctgcctgcctgcctatcaatcgtcttctttttagtacggatgtgctctcgctttattgtccatgctctgggcacacgtggtctcttttcaaacttctatgattattattattgtaggcgtcatctcacgtgtcgaggtgatctcgaacttttaggctccagagatcctcccgcatcggcctcccggagtgctgtgatgacacgcgtgggcacggtacgctctggtcgtgtttgtcgtgggtcggttctttccgtttttaatacggggactgcgaacgaagaaaatttccagacgcatctcaccgatccgccttttcgttctttctttttattctctttagacggagtttcactcttgtcgcccagggtggagtacgatggcggctctcggctcaccgcaccctccgcctcccaggttcaagtgattctcctgcctcagccttcccgagtagctggaatgacagagatgagccatcgtgcccggctaatttttctatttttactacagatggggtttctccatcttggtcaggctggtcttcaacttccgaccgttggagaatcttaactttcttggtggtggttgttttcctttttcttttttttcttttcttttctttccttctcctccccccccacccccccttgtcgtcgtcctcctcctcctcctcctcctcctcctcctcctcctcctcctcctcctctttcatttctttcagctgggctctcctacgtgtgttgctctgttgctcacgctggtctcaaactcctggccttgacgcttctcccgtcacatccgccgtctggttgttgaaatgagcatctctcgtaaaatggaaaagatgaaagaaataaacacgaagacggaaagcacggtgtgaacgtttctcttgccgtctcccggggtgtaccttggacccggaaacacggagggagcttggctgagtgggttttcggtgccgaaacctcccgagggcctccttccctctcccccttgtccccgcttctcccccagccgaggctcccaccgccgccctggcattttccataggagaggtatgggagaggactgacacgccttccagatctatatcctgccggacgtctctggctcggcgtgccccaccggctacctgccaccttccagggagctctgaggcggatgcgacccccacccccccgtcacgtcccgctaccctcccccggctggcctttgccgggcgaccccaggggaaccgcgttgatgctgccttcggatcctccggcgaagacttccaccggatgccccgggtgggccggttgggatcagactggaccaccccggaccgtgctgttcttgggggtgggttgacgtacagggtggactggcagccccagcattgtaaagggtgcgtgggtatggaaatgtcacctaggatgccctccttcccttcggtctgccttcagctgcctcaggcgtgaagacaacttcccatcggaacctcttctcttccctttctccagcacacagatgagacgcacgagagggagaaacagctcaatagataccgctgaccttcatttgtggaatcctcagtcatcgacacacaagacaggtgactaggcagggacacagatcaaacactatttccgggtcctcgtggtgggattggtctctctctctctctctctctctctctctctctctctctctctcgcacgcgcacgcgcgcacacacacacacaatttccatatctagttcacagagcacactcacttccccttttcacagtacgcaggctgagtaaaacccgccccaccctccacccgttggctgacgaaaccccttctctacaattgatgaaaaagatgatctgggccgggcacgctagctcacgcctgtcactccggcactttgggaggccgaggcgggtggatcgcttggggccgggagttcgagaccaggctggccgacgtggcgaaaccccgtctctctgaaaaatagaacgattagccgggcctggtggcgtgggcttggaatcacgaccgctcgggagactggggcgggcgacttgttccaaccggggaggccgaggttgcgatgagctgagatcgtgccgtggcgatgcggcctggatgacggagcgagaccccgtgtcgagagaatcatgatgttattataagatgagttgtgcgcggtgatggccgcctgtagtcgcggctactcgggaggctgagacgaggagaagatcacttgaggccccacaggtcgaggcttcggtcggccgtgacccactgtatcctgggcagtcaccggtcaaggagatatgccccttccccgtttgcttttcttttcttcccttctcttttcttctttttgcttctcttttctttctttctttctttctttctttctttctttctttctttttctttttctctcttcccctctttctttcctgccttcctgcctttcttcttttcttctttcctcccttcctcccttccttctttcctcccgcctcagcctcccaaagtgctgggatgactggcgggaggcaccatgcctgcttggcccaaagagaccctcttggaaagtgagacgcagagagcgccttccagtgatctcattgactgatttagagacggcatctcgctccgtcaccccggcagtggtgccgtcgtaactcactccctgcagcgtggacgctcctggactcgagcgatccttccacctcagcctccagagtacagagcctgggaccgcgggcacgcgccactgtgcccacaccgtttttaattgtttttttttcccccgagacagagtttcactctcgtggcctagactgcagtgcggtggcgcgatcttggctcaccgcaacctctgcctcccggtttcaagcgattctcctgcatcggcctcctgagtagccgggattgcgggcatgcgctgccacgtctggctgatttcgtatttttagtggagacggggcttctccatgtcgatcgggctggtttcgaactcccgacctcaggtgatccgccctccccggcctccggaagtgctgggatgacaggcgtgagccaccgcgcccggccttcatttttaaatgttttcccacagacggggtctcatcatttctttgcaaccctcctgcccggcgtctcaaagtgctggcgtgacgggcgtgagccactgcgcctggactccggggaatgactcacgaccaccatcgctctactgatcctttctttctttctttctttctttctttctttctttctttctttctttctttctttctttcttgatgaattatcttatgatttatttgtgtacttattttcagacggagtctcgctctgggcggggcgaggcgaggcgaggcacagcgcatcgctttggaagccgcggcaacgcctttcaaagccccattcgtatgcacagagccttattcccttcctggagttggagctgatgccttccgtagccttgggcttctctccattcggaagctttgacaggcgcaaccccacccagaggctggctgcggctgaggattagggggtgtgttggggctgaaaactgggtcccctatttttgatacctcagccgacacatcccccgaccgccatcgcttgctcgccctctgagatcccccgcctccaccgccttgcaggctcacctcttactttcatttcttcctttcttgcgtttgaggagggggtgcgggaatgagggtgtgtgtggggagggggtgcggggtggggacggaggggagcgtcctaagggtcgatttagtgtcatgcctctttcaccaccaccaccaccaccgaagatgacagcaaggatcggctaaataccgcgtgttctcatctagaagtgggaacttacagatgacagttcttgcatgggcagaacgagggggaccggggacgcggaagcctgcttgagggaggaggggtggaaggagagacagcttcaggaagaaaacaaaacacgaatactgtcggacacagcactgactacccgggtgatgaaatcatctgcacactgaacacccccgtcacaagtttacctatgtcacagtcttgcacatgtatgcttgaacgacaaataaaagttaggggggagaagagaggagagagagagagagagagagacagagagagacagagagagagagagaggagggagagagaaaacgaaacaccacctccttgacctgagtcagggggtttctggccttttgggagaacgttcagcgacaatgcagtatttgggcccgttctttttttttcttcttcttttctttctttttttttggactgagtctctctcgctctgtcacccaggctgcggtgcggtggcgctctctcggctcactgaaacctctgcttcccgggttccagtgattcttcttcggtagctgggattacaggcgcacaccatgacggccggctcatattcctattttcagtagagacggggtttctccacgttggccacgctggtctcgaactcctgacctcaaatgatccgccttcctgggcctcccaaagtgctggaaacgacaggcctgagccgccgggatttcagcctttaaaagcgcgggccctgccacctttcgctgtggcccttacgctcagaatgacgtgtcctctctgccgtaggttgactccttgagtcccctaggccattgcactgtagcctgggcagcaagagccaaactccgtccccccacctccccgcgcacataataactaactaacaaactaactaactaactaaactaactaaataaataaaatctctacacgtcacctctaagtgtgtgttcccgtgaggagtgatttctaagaaatggcactgtacactgaacgcagtggctcacgtctgtcatcccgaggtcaggagttcgagaccagcccggccaacgtggtgaaacccccgtctctactgaaaatacgaaatggagtcaggcgccgtggggcaggcacctgtaaccccagctactcgggaggctggggtggaagaattgcttgaacctggcaggcggaggctgcagtgacccaagatcgcaccactgcactacagcctgggcgacagagtgagacccggtctccagataaatacgtacataaataaatacacacatacatacatacatacatacatacatacatacatacatacatccatgcatacagatatacaagaaagaaaaaaagaaaagaaaagaaagagaaaatgaaagaaaaggcactgtattgctactgggctagggccttctctctgtctgtttctctctgttcgtctctgtctttctctctgtgtctctttctctgtctgtctgtctctttctttctctctgtctctgtctctgtctttgtctctctctctccctctctgcctgtctcactgtgtctgtcttctgtcttactctctttctctccccgtctgtctctctctctctctctccctccctgtttgtttctctctctccctccctgtctgtttctctctctctctttctgtctgtttctgtctctctctgtctgtctatgtctttctctgtctgtctctttctctgtctgtctgcctctctctttctttttctgtgtctctctgtcggtctctctctctctgtctgtctgtctgtctctctctctctctctctgtgcctatcttctgtcttactctctttctctgcctgtctgtctgtctctccctccctttctgtttctctctctctctctctctctctccccctctccctgtctgtttctctccgtctctctctctttctgtctgtttctcactgtctctctctgtccatctctctctctctctgtctgtctctttcgttctctctgtctgtctgtctctctctctctctctctctctctctctctctctctctctgtctctcactctctgtgtgtatcttctgtcttactctccttctctgcctgtccgtctgtctgtctgtctgtctgtctctctctccctttctgtctctctctctctctgtccctctctctttctgtctgttcctctctctctctctgtctctgtctttctctgtctgtctgcctctctctttctttctctttctgtgtctctctgtctctctctctgtgcctatcttctgtcttactctctttctctgcctgcctgcctgtctgtctgtctgtctctctctgtctctctccctgcctttctgtttctctctctctctccctctctctctccctctctcgctctctctgtctttctctctttctctctgtttctctgtctctctctgtccgtctctgtctttttctgtctgtctctctctttctttctgtctgtctctgtctctgtctctctctctctctctgcttgtctctctcactgtgtctgtcctctgtcttactctccttctctgcctgtccgtctgtctgtctgtctctctctctctccctccctttctgtttctctctcgctctctctctctctctctctctctctctctgcctgtttctctttctctctctgtctgtctctgtctttctctgtctgtctctttctctgtctgtctgtctccttctctctgtctccgtctctgtctctctctctctgtctctctctctctgcctgtctcactgtgtctgtcttctgtcttattctctttctctgtctgtctgtctctctctctcccttcctgtctctttctctctctctctctctttctgtctgtttctctctgcctgtctccgtctttctctgtctgcctctctctttctttttctgcgtctctctgtctctctctctctgtgcctatcttctgtcttactctgtttctctgcctgcctgtctgtctgtctgtctctctctctctctgtctctctctctttctgtctgtttctctctgtctctctgtccatctctgtctttctctgtccgtctctctctttctccctgtctctgtctctgcctctgcctctctctctctctgtctctctctttctatctgtttctctctgtctctctgtccatctctgtctttctctgtctgtctctctctttctccctgtctctgtctctgcctctctctctctctctctgtctgtctctctcactgtgtgtgtgtctctgtctctgcctctctctctctctctctctctgtctgtctctctcactgtgtgtgtctgtcttctgtcttactctccttctctgcctgtccgtctgtctgtctgtctctccctctctctccctccctttctgtttctctctctctctctctctctttctgtctgtttctctctttctctctctgtctgtctctttctctgtctgtctgtctctctctttctttttctctgtctctctgtctctctctgtgcctgtctctctgtctgtgcctatcttctgtcttactctctttctctggctgactgcctgtctctctctctctctctctctctctctctctctgcctgtctccgtccctccctccctgtctgtctgtttctctctctgtccatttctgtctgtctctttctctttctctctctttctttctctctgtctctctctgtctctctctgtctctctctctctctctctctctctctctctctctctctctctgcctttctctctcactgtgtcggtcttctgtcttactctctttctctgcctgcctctctgtctgtctgtctgtctctctccctccatgtctctctctctctctctctcactcactgtctctccgtctctctctctttctgtctgtttctctctgtctctgtctttctgtgtgtctgtctgtctctctctctatttgtctttctccctccctgtctgtttctctctctctctctctctctctctctctctctctctctgtctgtctgtttctctctatctctcgctgtccatctctgtctttctatgtctgtctctttctctgtcagtctgtcagacacccccgtgccgggtagggccctgccccttccacgaaagtgagaagcgcgtgcttcggtgcttagagaggccgagaggaatctagacaggcgggccttgctgggcttccccactcggtgtacgatttcgggaggtcgaggccgggtccccgcttggatgcgaggggcattttcagacttttctctcggtcacgtgtggcgtccgtacttctcctatttccccgataagctcctcgacttcaacataaacggcgtcctaagggtcgatttagtgtcatgcctctttcaccgccaccaccgaagatgaaagcaaagatcggctaaataccgcgtgttctcatctagaagtgggaacttacagatgacagttcttgcatgggcagaacgagggggaccggggacgcggaagcctgcttgagggaggaggggtggaaggagagacagcttcaggaagaaaacaaaacacgaatactgtcggacacagcactgactacccgggtgatgaaatcatctgcacactgaacacccccgtcacaagtttacctatgtcacagtcttgctcatgtatgcttgaacgacaaataaaagttcgggggggagaagagaggagagagagagagagacggggagagaggggggagagggggggggagagagagagagagagagagagagagagagaaagagaagtaaaaccaaccaccacctccttgacctgagtcagggggtttctggccttttgggagaacgttcagcgacaatgcagtatttgggcccgttctttttttcttcttcttcttttctttctttttttttggactgagtctctctcgctctgtcacccaggctgcggtgcggtggcgctctctcggctcactgaaacctctgcttcccgggttccagtgattcttcttcggtagctgggattacaggtgcgcaccatgacggccggctcatcgttctatttttagtagagacggggtttctccacgttggccacgctggtctcgaactcctgaccacaaatgatccaccttcctgggcctcccaaagtgctggaaacgacaggcctgagccgccgggatttcagcctttaaaagcgcgggccctgccacctttcgctgcggcccttacgctcagaatgacgtgtcctctctgccataggttgactccttgagtcccctaggccattgcactgtagcctgggcagcaagagccaaactccgtccccccacctccccgcgcacataataactaactaactaactaactaactaaaatctctacacgtcacccataagtgtgtgttcccgtgaggagtgatttctaagaaatggtactgtacactgaacgcagtggctcacgtctgtcatcccgaggtcaggagttcgagaccagcccggccaacgtggtgaaacccccgtctctactgaaaatacgaaatggagtcaggcgccgtggggcaggcacctgtaaccccagctactcgggaggctggggtggaagaattgcttgaacctggcaggcggaggctgcagtgacccaagatcgcaccactgcactacagcctgggcgacagagtgagacccggtctccagataaatacgtacataaataaatacacacatacatacatacatacatacatacatacatacatacatacagatatacaagaaagaaaaaaagaaaagaaaagaaagagaaaatgaaagaaaaggcactgtattgctactgggctagggccttctctctgtctgtttctctctgttcgtctctgtctttctctctgtgtctctttctctgtctgtctgtctgtctgtctgtctctttctttctttctgtctctgtctttgtccctctctctccctctctgcctgtctcactgtgtctgtcttctatcttactctctttctctccccgtctgtctctctctcactccctccctgtctgtttctctctctctctctttctgtctgtttctgtctctctctgtctgcctctctctttctctatctgtctctttctctgtctgtctgcccctctctttctttttctgtgtctctctgtctgtctctctctctctctgtgcctatcttctgtcttactctctttctctgcctgtctgtctgtctctctctgtctctccctccctttctgcttctctctctctctctctctctcccccctccctgtctgttctctctgtctccctctctttctgtctgtttctcactgtctctctctgtctgtctgtttcattctctctgtctctgtctctgtctctctctctctctgtctctccctctctgtgtgtatcttttgtcttactctccttctctgcctgtccgtctgtctgtctgtctctctctctccctgtccctctctctttctgtctgtttctctctctctctctctctctctctctctctgtctctgtctttctctgtctgtccctttctctgtctgtctgcctctctctttctctttctgtgtctctctgtctctctctctgtgcctatcttctgtcttactctctttctctgcctgtctatctgtctgtctctctctgtctctctccctgcctttctgtttctctctctctccctctctcgctctctctgtctttctctctttctctctgtttctctgtctctctctgtccgtctctgtctttttctgtctgtctgtctctctctttctttctgtcgtctgtctctgtctctgtctctgtctctctctctctctctctccttgtctctctcactgtgtctgtcttctgtcttactctccttctctgcctgtccatctgtctgtctgtctctctctctctctccctacctttctgtttctctctcgctagctctctctctctctgcctgtttctctctttctctctctgtctttctctgtctgtctctttctctgtctgtctgtctctttctctctgtctctgtctctgtctctctctctctctctctctctctgcctctctcactgtgtctgtcttctgtcttattctctttctctctctgtctctctctctctctcctttcctgtctgtttttctctctctctctctctttctgcctgtttctctctgtctgtctctgtctttctctgtctgtctgcctctctctttctttttctgcgtctctctgtctctctctctctctctctgttcctatcttctgtcttactctgtttccttgcctgcctgcctgtctgtgtgtctgtctctctctctctctctctctctctctctccctccctttctctttctctgtctctctctctctttctgggtgtttctctctgtctctctgtccatctctgtctttctatgtctgtctctctctttctctctgtctctgtctctgcctctctctctctctctctctctctctctctgtctgtctctctcactgtgtgtgtctgtcttctgtcttactctccttctctgcctgtccgtctgtctgtctgtctctccctctctctccctccctttctgtttctctctctctctctttctgtctgtttctctctttctctctctgtctgtctctttctctgtctgtctgtctctctctttctttttctctgtctctctgtctctctctgtgtctgtctctctgtctgtgcctatcttctgtcttactctctttctctggctgtctgcctgtctctctctctctctctgtctgtctccgtccctctctccctgtctgtctgtttctctctctgcctctctctctctctgtctgtctctttctctgtctgtctgtctctctctttctttttctctgtctctctgtctctctctgtgtctgtctctctttctgtgcctatcttctgtcttactctctttctctggctgtctgcctgtctctctctctctgcctgtctccgtccctccctccctgtctgtctgtttctctctctgtctctgtctctctgtccatctctgtctgtctctttctctttctctctctctgtctctgtctctctctctctctgcctgtctctctcactgtgtctgtcttctgtcttactctctttctctgcctgcctctctgtctgtctgtctctctccctccatgtctctctctctctctcactcactctctctccgtctctctctctttctgtctgtttctctctctgtctgtctctctccctccatgtctctctctctctctctcactcactctctctccgtctctctctctctttctgtctgtttctctctctgtctgtctctctccctccatgtctctctctctccctctcactcactctctctccgtctctctctctctttctgtctgtttctctgtctgtctgtctgtctgtctgtctctctctctctctctctctctctctgtttgtctttctccctccctgtctgtctgtctgtctctctctctctgtctctgtctctgtctctctctctttctctttctgtctgtttctctctatctctcgctgtccatctctgtctttctatgtctgtctctttctctgtcagtctgtcagacacccccgtgccgggtagggccctgccccttccacgagagtgagaagcgcgtgcttcggtgcttagagaggccgagaggaatctagacaggcgggccttgctgggcttccccactcggtgtacgatttcgggaggtcgaggccgggtccccgcttggatgcgaggggcattttcagacttttctctcggtcacgtgtggcgtccgtacttctcctatttccccgataagctcctcgacttcaacataaactgttaaggccggacgcaacacggcgaaaccccgtctctactaaaaatacaaagctgagtcgggagcggtggggcaggcccctgtaatgccagctcctcgggaggctgaggcgggagaatcgcttgaaccagggaagcggaggctgcagggagccgagatcgcgccactgcactacggcccaggctgtagagtgagtgagactcggtctctaaataaatacggaaattaattaattcattaattcttttccctgctgacggacatttgcaggcaggcatcggttgtcttcgggcatcacctagcggccactgttattgaaagtcgacgtgacacggagggaggtctcgccgacttcaccgagcctggggcaacgggtttctctctctcccttctggaggcccctccctctctccctcgttgcctagggaacctcgcctagggaacctccgccctggcgggggccctattgttctttgatcggcgctttacttttctttgtgttttggcgcctagactcttctacttgggctttgggaagggtcagtttaattttcaagttgccccccggctccccccactacccacgtcccttcaccttaatttagtgagtcggttaggtgggtttcccccaaaccgccccccccccccccgcctcccaacaccctgcttggaaaccttccagagccaccccggtgtgcctccgtcttctctccccttcccccaccccttgccggcgatctcattcttgccaggctgacatttgcatcggtgggcgtcaggcctcactcgggggccaccgtttttgaagatgggggcggcacggtcccacttccccggaggcagcttgggccgatggcatagccccttgacccgcgtgggcaagcgggcgggtctgcagttgtgaggcttttccccccgctgcttcccgcctcaggcctccctccctaggaaagcttcaccctggctgggtctcggtcaccttttatcacgatgttttagtttctccgccctccggccagcagagtttcacaatgcgaagggcgccacggctctagtctgggccttctcagtacttgcccaaaatagaaacgctttctgaaaactaataactttgctcacttaagatttccagggacggcgccttggcccgtgtttgttggcttgttttgtttcgttctgttttgttttgttcgtgtttttcctttctcgtatgtctttcttttcaggtgaagtagaaatccccagttttcaggaagacgtctattttccccaagacacgttagctgccgttttttcctgttgtgaactagcgcttttgtgactctctcaacgtgcagtgagagccggttgatgtttactatccttcatcatgacatcttattttctagaaatccgtaggcgaatgctgctgctgctcttgttgctgttgttgttgttgttgttgtcgtcgttgctgttgtcgttgtcgttgttgttgtcgttgtcgttgttttcaaagtataccccggccaccgtttatgggatcaaaagcattataaaatatgtgtgattatttcttgagcacgcccttcctccccctctctctgtctctctgtctgtctctgtctctctctttctctgtctgtcttctctctctctctctctctgtgtctctctctctctgcctgtctgtttctctctctctgcctctctctctctctctctctctgcctgtctctctcactgtgtctgtcttctgtcttactccctttctctgtctgtctgtcggtctctctctctctctctccctgtctgtatgtttctctctgtctctgtctctctctctctttctgtttctctctctccgtctctgtctttctctgactgtctctctctttccttctctctgtctctctctgcctgtctctctcactctgtcttctgtcttactctctctctctgcctgtctctctcccttcctgtctgtttctctctctttctgtttctctctgtctctgtccatctctgtctttctccgtctgtctctttatctgtctctctccgtctgtctctttatctgtctctctctctctttctgtctttctctctctgtgtatcgttgtctctctctgtctgtctctgtctctgtctctctgtctctctctctctctctctctctctgtctgtctgtccgtctgtctgtctcggtctctggctctcgctatcccccgccctctctttttttgcaaaagaagctcaagtacatctaatctaatcccttaccaaggcctgaattcttcacttctgacatcccagatttgatctccctacagaatgctgtacagaactggcgagttgatttctggacttggatacctcatagaaactacatatgaataaagatccaatcctaaaatctggggtggcttctccctcgactgtctcgaaaaatcgtacctctgttcccctaggatgccggaagagttttctcaatgtgcatctgcccgtgtcctaagtgatctgtgaccgagccctgtccgtcctgtctcaaatatgtacgtgcaaacacttctctccatttccacaactacccacggccccttgtggaaccactggctctttgaaaaaaatcccagaagtggttttggctttttggctaggaggcctaagcctgctgagaactttcctgcccaggatcctgtgtgaccaaaagtgcctctgctgggagctgggatcctcgggaccatgcttgctagcgctggatgagtctctggaaggacgcacgggactccgcaaagctgacctgtcccaccgaggtcaaatggatacctctgcattggcccgaggcctccgaagtacatcaccgtcaccaaccgtcaccgtcagcatccttgtgagcctgcccaaggccccgcctccggggagactcttgggagcccggccttcgtcggctaaagtccaaagggatggtgacttccacccacaaggtccccactgaacggcgaagatgtggagcgtaggtcagagaggggaccaggaggggagacgtcccgacaggcgacgagttcccaaggctctggccaccccacccacgccccacgccccacgtcccgggcacccgcgggacaccgccgctttatcccctcctctgtccacagccggccccaccccaccacgcaacccacgcacacacgctggaggttccaaaaccacacggtgtgactagagcctgacggagcgagagcccatttcacgaggtgggaggggtgggggtggggtgggttgggggttgtggggtctgtggcgagcccgattctccctcttgggtggctacaggctagaaatgaatatcgcttcttgggcggaggggcttccttaggccatcaccgcttgcgggactacctctcaaaccctcccttgaggccacaaaatagattccaccccacccatcgacgtttcccccgggtgctggatgtatcctgtcaagagacctgagcctgacaccgtcgaattaaacaccttgactggctttgtgtgtttgtttgtttctgagatggagtcttgctctgtcccccaggctggagtgcagtggcgtgatctcagctcactggaacctctgcctcctgggttcaagtgattctcctgtctcagcgccaccatggccggctcatttttttttttttttttttttttttttttttttttttttttttggtagacacggggtttcaccctctttcattggttttcactggagattctagattcgagccacacctcattccgtgccacagagagacttctttttttttttttttttaagcgcaacgcaacatgtctgccttatttgagtggcttcctatatcattataattgtgttatagatgaagaaacggtattaaacactgtgctaatgatagtgaaagtgaagacaaaagaaaggctatctattttgtggttagaataaagttgctcagtatttagagctacctaaatacgtcagcatttacactcttcctagtaaaagctggccaatctgaataatcctcctttaaacaaacacaatttttgatagggttaagatttttttaagaatgcgactcctgcaaaatagctgaacagacgatacacatttaaaaaaataacaacacaaggatcaaccagacttgggaaaaaatcgaaaaccacacaagtcttatgaagaactgagttcttaaaataggacggagaacgtagctatcggaagagaaggcagtattggcaagttgattgttacgttggtcagcagtagctggcactatctttttggccatctttcgggcaatgtaactactacagcaaaatgagatatgatccattaaacaacatattcgcaaatcaaaaagtgtttcagtaatataatgcttcagatttagaagcaaatcaaatgatagaactccactgctgtaataagtcaccccaaagatcaccgtatctgacaaaataactaccacagggttatgacttcagaatcatactttctcttgatatttacttatgtatgtatttattttttttaatttatttctcttgagacggcgtctcgctctgtcgcccaggctggagtgcgatggtgtgatctcggctcactgcaaccgccacctccctgggttcaagcgattctcctgcctcagcctcccgagtagctgggactacaggtgcccgccaccacgcccagctaatctttatacttttaatagagacggggtttcaccgtgtcggcccggatggtctcgatctcttgacctcgtgacccgcccgcctcggcctcccaaagtgctgggatgacaggcgtgagccactgagcccggccttctcttgacgtttaaactatgaagtcagtccagagaaacgcaataaatgtcaacggtgaggatggtgttgaggcagaagtaggaccacactttttcctatcttattcagttgataacaatatgacctaggtagtaatttcctatgtgcctacttatacacgagtacaaaagagtaaaacagagagactgctaaattaaagggtacgtgaagttcttcatagtaactccgtaaactggaacactgtcaaaaagcagcagctagtgaattgtttccatgtatttttctattatccaataagtgaactatgctattcctttccagtctcccaagcacttcttgtccccatcaccacttcggtgctcgaagaaaaagtaacaaatcaaggaacacaactaaagaaacacacacacaaaccaaagacaactacagcgtctgcaaaagtttgctagaagactgaaactgttgagtataaggatctggtattctacgatcatgagttcacttcagagtttgttcaagacatacgtttcgtaaggaaacatcttagttagaagttattcagcagtaggtaccatccctaagtatttttcaccaaattcgtgacaataaagagctatctaaccagaaaaattagcgagtaccggcaccatccatagggctttgtctttacgcttcattagcacttaccatgccttacaatgtctaggattgaccctgatagcatttcgaaaacaagctaatgctttgtccagttcttcagtgaagacaagctcacgccctaatgcgctataggcataagcatcatttggatccacttcgagagttctctggaagaattgaatcgcaatatcgtgttcccgttgcagaccgaaacagttccctgcagcacaccaggcctctggctggcgaatttttatccatgtctgtgaagtctttggacagaactgaaagagcaacctctttcggaggatgccaaagtgttgtagagtagatctccatgccttcgactctgtaattctcaatcctcctaacctctgagaattgtctttcagcttgcgtggactctgaaagtttacaataggcccttccgatttggcacagtacccaaccggtattgcagtggtgagaagctagatggctcaagatgctgatagcttctttgccgtggtaagaacacaaagctaaataacctttccccctttcacgaagaaggctcatcaagccttccgctgctgctttttgtagattaaaagcctgaatctgaggcgcgattgtggctattttcccttctgaaatgacggaagagtccaattttgtcacttccaggctatcacttatgttcggtggagttattgctcctttattagttttacttttggttcttctgtttgggattttaggtggaaacttcatttttaattttctcctattctcctcggttgtggagctgtcactagtcaagagtcgtgaatttcttcgaggcggtgcatttgggggagatgccatagtggggctcaatacctgaggtgttgcccttgtcggcggaccagaactttgtgtttttgcaaggactggagttacctttcggctctttcccctctgcgagaagacagacggtgttccggtttggccgattctggcaacaggcttttttgaaggggctccggtggatggcacgtcaatgacagacggtgtctcataccagtgcagttttgtcaatagggtccgtctccgggacttggggtttctaatggcaaaatgccaacacttggggttaatggactaacagctgctggtcctcctaataaacttcgaccagtttttggtttatgttgaacctgtttagatcatatggaagttcctgttcccagtgggacagtatcaggtgaaaggacagctgaatcgatagaagacactggggagtctgtattcaaggagtactttgaattggaagattctaaattccatccgtttcattcgacggtgtcctggggtgtttccgtaagaacggtctcgggctgtctgtgacataaactaggacgaggtccaagtgttgtggcgcaacacttggacaggcagttgctaaagctctctagagaggtgaatcaaaatgtttggtcaggatctggcttttcccccctatttcacatcatgattcaaagggacaccagaggaaaggatttcaacgaaggctcttttggtcacattctgatcctttggtaagccgatctgtcttgcaatatacatgtcccgacgatggaaggggaaagcgagctgaatcaccaaactcaggaacgataatatcatcgtggcttttctgcttatgaaacactccacccgataagatttgatccccttctgcaagcttgctgagatcaacacaacatttcgcaagcaggcatttgcattgcggggtagtacaactgtgtcctttcaagagtctatatgttttataggcctttcctgagcggtaagaacaggtcgccagtaagaacaaggcttcttctgagtgtacttctgcataaaggcgttctgcgggggaaaccgcatctcggtaggcatagtggtttagtgcttgccatatagcagcctggacgggtccctgcagcaccgccatcctcgaggctcaggcccactttctgcagtgccacaggcaccccccccccccccatagcggctccggcccggccagcctcggctcatttaaaggcaccagccgccgttaccgggggatgggggagtccgagacagaatgacttctttatcctgctgactctggaaagcccggcgccttgtgatccattgcaaaccgagagtcacctcgtgtttagaacacggatccactcccaagttcagtggggggatgtgaggggtgtggcaggtaggacgaaggactctcttccttctgattcggtctgcacagtggggcctagggctggagctctctccgtgcggaccgctgactccctctaccttgggttccctcggccccaccctggaacgccgggccttggcagattctggcccttcctggcccttcagtcgctgtcagaaaccccatctcatgctcggatgccccgagtgactgtggctcgcacctctccggaaacattggaaatctctcctctacgcgcggccacctgaaaccacaggagctcgggacacacgtgctttcgggagagaatgctgagagtctcttgccgactctctcttgacttgagttcttcgtgggtgcgtggttaagacgtagtgagaccagatgtattaactcaggccgggtgctggtggctcacgcctgtaaccccaacactttgggaggccgaggccgtaggatccctcgaggaatcgcctaaccctggggaggttgaggttgcagtgagtgagccatagttgtgtcactgtgctccagtctgggcgaaagacagaatgaggccctgccacaggcaggcaggcaggcaggcaggcagaaagacaacagctgtattatgttcttctcagggtaggaagcaaaaataacagaatacagcacttaattaatttttttttttcccttcggacggagtttcactcttggtgcccacgctggagtgcagtggcaccatctcggctcaccgcaacctccacctcccgcgttcaagcgattctcctgcctcagcctcctgagtagctgggattacagggaggagccaccacacccagctgattttgtattgttagtagagacggcatttctccatgtgggtcaggctggtctcgaactggcgaccccagtggatctgcccgccccggcctcccaaagtgctggggtgacaggcgtgagccatcgtgactggccggctacgtttatttatttatttttttaattattttacttttttttagttttccattttaatctatttatttatttacatttatttatttatttatttatttacttatttatttattttcgagacagactctcgctctgctgcccaggctggagtgcagcggcgtgatctcggctcactgcaagctccgcctcccgggttcacgccattctcctgcctcagcctcccaagtagctgggactacaggcgcccgccaccgtgcccggctaactttttgtattttgagtagagatggggtttcactgtggtagccaggatggtctcgatctcctgaccccgtgatccgtccacctcggcctcccaaagtgctgggatgacaggcgtgagccaccgcccccggcctatttatctatttattaactttgagtccaggttatgaaaccagttagtttttgtaattttttttttttttttttttttttgagacgaggtttcaccgtgttgccaaggcttggaccgagggatccaccggccctcggcctcccaaaagtgcggggatgacaggcgcgagcctaccgcgcccggaccccccctttccccttcccccgcttgtcttcccgacagacagtttcacggcagagcgtttggctggcgtgcttaaactcattctaaatagaaatttgggacgtcagcttctggcctcacggactctgagccgaggagtcccctggtctgtctatcacaggaccgtacacgtaaggaggagaaaaatcgtaacgttcaaagtcagtcattttgtgatacagaaatacacggattcacccaaaacacagaaagcagtcttttagaaatggccttagccctggtgtccgtgccagtgattcttttcggtttggaccttgactgagaggattcccagtcggtctctcgtctctggacggaagttccagatgatccgatgggtgggggacttaggctgcgtccccccaggagccctggtcgattagttgtggggatcgccttggagggcgcggtgacccactgtgctgtgggagcctccatccttccccccaccccctccccaggggatcccaattcattccgggctgacacgctcactggcaggcgtcgggcatcacctagcggtcactgttactctgaaaacggaggcctcacagaggaagggagcaccaggccgcctgcgcacagcctggggcaactgtgtcttctccaccgcccccgcccccacctccaagttcctccctcccttgttgcctaggaaatcgccactttgacgaccgggtctgattgacctttgatcaggcaaaaacgaacaaacagataaataaataaaataacacaaaagtaactaactaaataaaataagtcaatacaacccattacaatacaataagatacgatacgataggatgcgataggatacgataggatacaatacaatacgatacgatacaatacaatacaatacaatacaatacaatacaatacaatacaatacaatacgccgggcgcggtggctcatgcctgtcatcccgtcactttgggatgccgaggtggacgcatcacctgaagtcgggagttggagacaagcccgaccaacatggagaaatcccgtctcaattgaaaatacaaaactagccgggcgcggtggcacatgcctataatcccagctgctaggaaggctgaggcaggagaatcgcttgaacctgggaagcggaggttgcagtgagccgagattgcgccatcgcactccagtctgagcaacaagagcgaaactccgtctcaaaaataaatacataaataaatacatacatacatacatacatacatacatacataaattaaaataaataaataaaataaaataaataaatgggccctgcgcggtggctcaagcctgtcatcccctcactttgggaggccaaggccggtggatcaagaggcggtcagaccaacagggccagtatggtgaaaccccgtctctactcacaatacacaacattagccgggcgctgtgctgtgctgtactgtctgtaatcccagctactcgggaggccgagctgaggcaggagaatcgcttgaacctgggaggcggaggttgcagtgagccgagatcgcgccactgcaacccagcctgggcgacagagcgagactccgtctccaaaaaatgaaaatgaaaatgaaacgcaacaaaataattaaaaagtgagtttctggggaaaaagaagaaaagaaaaaagaaaaaaacaacaaaacagaacaaccccaccgtgacatacacgtacgcctctcgcctttcgaggcctcaaacacgttaggaattatgcgtgatttctttttttaacttcattttatgttattatcatgattgatgtttcgagacggagtctcggaggcccgccctccctggttgcccagacaaccccgggagacagaccctggctgggcccgattgttcttctccttggtcaggggtttccttgtctttcttcgtgtctttaacccgcgtggactcttccgctcgggtttgacagatggcagctccactttaggccttgttgttgttggggactttcctgattctccccagatgtagtgaaagcaggtagatttgccttgcctggacttgcctggccttgccttttctttctttctttctttattactttctctttttcttcttcttcttcttcttcttcttcttcttcttcttcttcttcttcttctttttttttttgagacagagtttcactcttgttgcccaggctagagggcaatggtgcgatctcggctcaccgcaccctccgcctcccaggttcaagcgattctcctgcctcagcctcctgattagctgggattacaggcatgggccaccgtgcctggctgatgtttgtacttttagtagagacggtgtttttccatgttggtcaggctggtctcccactcccaacctcaggtggtccgcctgccttagcctcccaaagtgctgggatgacaggcgtgagccaccgcgcccagcctctctctctctctctctctctctctctctctctctctctctcgctcgcttgcttgcttgctttcgtgctttcttgctttcccgttttcttgctttctttctttctttcgtttctttcatgcttgctttcttgcttgcttgcttgctttcgtgctttcttgctttcctgttttctttctttctttctttcttttgtttctttcttgcttgctttcttgcttgcttgctttcgtgctttcttgttttctcgatttctttctttcttttgtttctttcctgcttgctttcttgcttgattgctttcgtgctttcttgctttcttgttttctttctttcttttgtttctttctttcttgcttccttgttttcttgctttcttgcttgcttgctttcgtgctttcttgttttcttgctttctttcttttgtttctttcttgcttgctttcttgcttccttgttttcttgctttcttgcttgcttgctttcgtgctttctttcttgctttcttttctttctttcttttctttttctttctttcttgctttcttttctttcattcattcattctttctttctttcctttctttctttctttctttctatctttctttctttctttctttctgtttcgtccttttgagacagagtttcactcttgtttccacggctagagtgcaatggcgcgatcttggctcaccgcaccttccgcctcccgggttcgagcgcttctcctgcctcagcctcccgattagcggggattacagggaggcacccccacgcctggcttggctgatgtttgtgtttttagtaggcacgccgtgtctctccatgttgctcaggctggtctccaactcccgacctcctgtgatgcgcccacctcggcctctcgaagtgctgggatgacgggcgtgagccaccgtgcccggcctgttgactcatttcgcttttttatttctttcgtttccacgcgtttacttatatgtattaatgtaaacgtttctgtacgcttatatgcaaacaacgacaacgtgtatctctgcattgaatactcttgcgtatggtaaatacgtatcggttgtatggaaatagacttctgtatgatagatgtaggtgtctgtgttatacaaataaatacacatcgctctataaagaagggatcgtcgataaagacgtttattttacgtatgaaaagcgtcgtatttatgtgtgtaaatgaacgagcgtacgtagttatctctgttttctttcttcctctccttcgtgtttttcttccttcctttcttcctttctctccttctttaggtttttcttcctctcttcctttccttctttctctctttctgtccttttttccttcgtgctttatttctctttcgttccctgtgtttccttcttttttctttcctctctgtttctttttcccttctttccttcgtttctttcctcattctttctctctttttcgtgtttctttccttcccgtctgtcttttaaaaaatggagtgtttcagaagtttactttgtgtatctacgttttctaaattgtctctcttttctccattgtcttcctccctccctccctccctccctccctgctcccttccctccctccttccctttcgccatctgtctcttttccccactcccctccccccgtctgtctctgcgtggattccggaagagcctacgcattctgcctctccgtgtgtctgcagcgacccgcgaccgagtccttgtgtgttctttctccctccctccctccctccctccctccctccctgcttccgagaggcatctccaaacacccacgcgccgtgggttgtcttctgactctgtcgcggtcgaggcagagacgcgttttgggcaccgtttgtgtggggttggggcagaggggctgcgttttcggcctcgggaagagcttctcgactcacggtttcgctttcgcggtccacgggccgccctgccagccggatctgtctcgctgacgtccgcggcggttgtcgggctccatctggcggccgctttgagatcgtgctctcggcttccggagctgcggtggcagctgccgagggaggggaccgtccccgctgtgagctaggcagagctccggaaagccccggtcgtcagcccggctggcccggtggcgccagagctgtggcgcgtcgcttgtgagtcacagctctggcgtgcaggtttatgtgggggagaggctgtcgctgcgcttctgggcccgcggcgggcgtggggctgcccgggccggtcgaccagcgcgccgtagctcccgaggcccgagccgcgacccgcggggacccgccgcgcgtggcgcgggaggctggggacgcccttcccggcccggtcgcgggtccgcgctcatcctggccgtctgaggcggcggccgaattcgtttccgagtccccgtggggagccggggaccgtcccgcccccgtcccccgggtgccggggagcggtccccgggccgggccgcggtccctctgccgcgatcctttctggcgagtccccgtgcggagtcggagagcgctccctgagcgcgcgtgcggcccgagaggtcgcgcctggccggccttcggtccctcgtgtgtcccggtcgtaggaggggccggccgaaaatgcttccggctcccgctctggagacacgggccggccccctgcgtgtggcacgggcggccgggagggcgtccccggcccggcgctgctcccgcgtgtgtcctggggttgaccagagggccccgggcgctccgtgtgtggctgcgatggtggcgtttttggggacaggtgtccgtgtcgcgcgtcgcctgggccggcggcgtggtcggtgacgcgacctcccggccccgggggaggtatatctttcgctccgagtcggcattttgggccgccgggttattgctgacacgctgtcctctggcgacctgtcgctggagaggttgggcctccggatgcgcgcggggctctggcctaccggtgacccggctagccggccgcgctcctgcttgagccgcctgccggggcccgcgggcctgctgttctctcgcgcgtccgagcgtcccgactcccggtgccggcccgggtccgggtctctgacccacccgggggcggcggggaaggcggcgagggccaccgtgcccccgtgcgctctccgctgcgggcgcccggggcggccgcgacaaccccaccccgctggctccgtgccgtgcgtgtcaggcgttctcgtctccgcggggttgtccgccgccccttccccggagtggggggttggccggagccgatcggctcgctggccggccggccggcctccgctcccggggggctcttcgtgatcgatgtggtgacgtcgtgctctcccgggccgggtccgagccgcgacgggcgaggggcggacgttcgtggcgaacgggaccgtccttctcgctccgccccgcgggggtcccctcgtctctcctctccccgcccgccggcggtgcgtgtgggaaggcgtggggtgcggaccccggcccgacctcgccgtcccgcccgccgccttctgcgtcgcgggtgcgggccggcggggtcctctgacgcggcagacagccctcgctgtcgcctccagtggttgtcgacttgcgggcggcccccctccgcggcggtgggggtgccgtcccgccggcccgtcgtgctgccctctcggggggtttgcgcgagcgtcggctccgcctgggcccttgcggtgctcctggagcgctccgggttgtccctcaggtgcccgaggccgaacggtggtgtgtcgttcccgcccccggcgccccctcctccggtcgccgccgcggtgtccgcgcgtgggtcctgagggagctcgtcggtgtggggttcggggcggtttgagtgagacgagacgagacgcgcccctcccacgcggggaagggcgcccgcctgctctcggtgagcgcacgtcccgtgctcccctctggcgggtgcgcgcgggccgtgtgagcgatcgcggtgggttcgggccggtgtgacgcgtgcgccggccggccgccgaggggctgccgttctgcctccgaccggtcgtgtgtgggttgacttcggaggcgctctgcctcggaaggaaggaggtgggtggacgggggggcctggtggggttgcgcgcacgcgcgcaccggccgggcccccgccctgaacgcgaacgctcgaggtggccgcgcgcaggtgtttcctcgtaccgcagggccccctcccttccccaggcgtccctcggcgcctctgcgggcccgaggaggagcggctggcgggtggggggagtgtgacccaccctcggtgagaaaagccttctctagcgatctgagaggcgtgccttgggggtaccggatcccccgggccgccgcctctgtctctgcctccgttatggtagcgctgccgtagcgacccgctcgcagaggaccctcctccgcttccccctcgacggggttgggggggagaagcgagggttccgccggccaccgcggtggtggccgagtgcggctcgtcgcctactgtggcccgcgcctcccccttccgagtcgggggaggatcccgccgggccgggcccggcgtcccagcgggttgggacgcggcggccggcgggcggtgggtgtgcgcgcccggcgctctgtccggcgcgtgactccctccgccgcgagtcggctctccgcccgctcccgtgccgagtcgtgaccggtgccgacgaccgcgtttgcgtggcacggggtcgggcccgcctggccctgggaaagcgtcccacggtgggggcgcgccggtctcccggagcgggaccgggtcggaggatggacgagaatcacgagcgacggtggtggtggcgtgtcgggttcgtggctgcggtcgctccggggcccccggtggcggggccccggggctcgtgagggggttctcggggggggcctagggccttccggcgtcccaggcggggcgccgcgggaccgccctcgtgtctgtggcggtgggatcccgcggccgtgttttcctggtggcccggccgtgcctgaggtttctccccgagccgccgcctctgcgggctcccgggtgcccttgccctcgcggtccccggccctcgcccgtctgtgccctcttccccgcccgccgcccgccgatcctcttcttccccccgagcggctcaccggcttcacgtccgttggtggccccgcctgggaccgaacccggcaccgctcgtgggcgccgcgccgcgcactgatcggcccggcgtcccgcgtcccccggcgcgcgccttggggaccgggtcggtggcgccccgcgtggagcacgggtggatttcaccggagtatatccgggggtcggcctttgcgggcgtgcagggggaggagacggttccgggggaccgccgcgactgcggcggtggtggggggagccgcggggatcgccggagggccggtcggcgccccgggtgccgcgcggtgccgccggggcgtgaggccccgcgcgtgtgtcccggctgcggtcggccgcgctcgaggggtccccgtggcgtccccttccccgccggccgcctttctcgcgccttccccgtcgccccggcctcgcccgtggtctctcgtcttctcccggcccgctcttccgaaccgggtcggcgcgtcccccgggtgcgcctcgcttcccgggcctgccgcggcccttccccgaggcgtccgtcccgggcgtcggcgtcggggagagcccgtcctccccgcgtggcgtcgccccgttcggcgcgcgcgtgcgccgagcgcggcccggtggtccctcccggacaggcgttcgtgcgacgtgtggcgtgggtcgacctccgccttgccggtcgctcgccctctccccgggtcggggggtggggcccgggccggggcatcggcggtcgcggtcccccgtcccgggcgggggcgggcgcgccggccggcctcggtcgccctcccttggccgtcgtgtggcgtgtgccacccctgcgcccgcgccgccgtcaggggtcggagccgggcttcggccgggccccgggccctcgaccggaccggtgcgcgggcgctgcggccgcacggcgcgactgtccccgggccgggcaccgcggtccgcctctcgctcgccgcccggacgtcggggccgccccgcggggcgggcggagcgccgtccccgcctcgccgccgcccgcgggcgccggccgcgcgcgcgcgcgcgtggccgccggtccctcccggccgccgggcgcgggtcgggccgtccgcctcctcgcgggcgggcgcgacgaagaagcgtcgcgggtctgtggcgcggggccccggtggtcgtgtcgcgtggggggcgggtggttggggcgtccggttcgccgcgccccgccccggccccaccggtcccggccgccgcccccgcgcccgctcgctccctcccgtccgcccgtccgcggcccgtccgtccgtccgtcgtcctcctcgcttgcggggcgccgggcccgtcctcgcgaggccccccggccggccgtccggccgcgtcggggcctcgccgcgctctaccttacctacctggttgatcctgccagtagcatatgcttgtctcaaagattaagccatgcatgtctgagtacgcacggccggtacagtgaactgcgaatggctcattaaatcagttatggttcctttggtcgctcgctcctctcctacttggataactgtggtaattctagagctaatacatgccgacgggcgctgacccccttcgcgggggggatgcgtgcatttatcagatcaaaaccaacccggtcagcccctctccggccccggccggggggcgggcgccggcggctttggtgactctagataacctcgggccgatcgcacgccccccgtggcggcgacgacccattcgaacgtctgccctatcaactttcgatggtagtcgccgtgcctaccatggtgaccacgggtgacggggaatcagggttcgattccggagagggagcctgagaaacggctaccacatccaaggaaggcagcagccgaaaagattacccactcccgacccggggaggtagtgacgaaaaataacaatacaggactctttcaggccctgtattggaatgagtccactttaaatcctttaacgaggatccattggagggcaagtctggtgccagcagccgcggtaattccagctccaatagcgtatattaaagttgctgcagttaaaaagctcgtagttggatcttgggagcgggcgggcggtccgccgcgaggcgagccaccgcccgtccccgccccttgcctctcggcgccccctcgatgctcttagctgagtgtcccgcggggcccgaagcgtttactttgaaaaaattagagtgttcaaagcaggcccgagccgcctggataccgcagctaggaataatggaataggaccgcggttctattttgttggttttcggaactgaggccatgattaagagggacggccgggggcattcgtattgcgccgctagaggtgaaattcttggaccggcgcaagacggaccagagcgaaagcatttgccaagaatgttttcattaatcaagaacgaaagtcggaggttcgaagacgatcagataccgtcgtagttccgaccataaacgatgccgaccggcgatgcggcggcgttattcccatgacccgccgggcagcttccgggaaaccaaagtctttgggttccggggggagtatggttgcaaagctgaaacttaaaggaattgacggaagggcaccaccaggagtggagcctgcggcttaatttgactcaacacgggaaacctcacccggcccggacacggacaggattgacagattgatagctctttctcgattccgtgggtggtggtgcatggccgttcttagttggtggagcgatttgtctggttaattccgataacgaacgagactctggcatgctaactagttacgcgacccccgagcggtcggcgtccccccaacttcttagagggacaagtggcgttcagccacccgagattgagcaataacaggtctgtgatgcccttagatgtccggggctgcacgcgcgctacactgactggctcagcgtgtgcctaccctacgccggcggtgggggtaacccgttgaaccccattcgtgatggggatcggggattgcaattattccccatgaacgaggaattcccagtaagtgcgggtcataagcttgcgttgattaagtccctgccctttgtacacaccgcccgtcgctactaccgattggatggtttagtgaggccctcggatcggccccgccgggtcggcccacggcctggcgaacgctgagaagacggtcgaacttgactatctagaggaagtaaaagtcgtaacaaggtttccgtaggtgaacctgcggaaggatcattaacggagcccggaggtgtgcccgcggcggcgccgccgccgccgcgcgcttccctccgcacacccacccccccaccgcgacgcggcgcgtgcgcgggcggggcccgcgtgcccgttcgttcgctcgctcgttcgttcgccgcccggccccgccggccgcgagagccggagaactcgggagggagacgggggagagagagagagagagagaaagagaaagaagggcgtgtcgttggtgtgcgcgtgtcgtggggccggcgggcggcggggagcggtccccggccgcggccccgacgacgtgggtgtcggcgggcgcgggggcggttctcggcggcgtcgcggcgggtctgggggggtctcggtgccctcctccccgccggggcccgtcgtccggccccgccgcgccggctccccgtcttcggggccggccggattcccgtcgcctccgccgcgccgctccgcgccgccgggcacggccccgctcgctctccccggccttcccgctagggcgtctcgagggtcgggggccggacgccggtcccctcccccgcctcctcgtccgcccccccgccgtccaggtacctagcgcgttccggcgcggaggtttaaagaccccttggggggatcgcccgtccgcccgtgggtcgggggcggtggtgggcccgcgggggagtcccgtcgggaggggcccggcccctcccgcgcctccaccgcggactccgctccccggccggggccgcgccgccgccgccgccgcggcggccgtcgggtgggggctttacccggcggccgtcgcgcgcctgccgcgcgtgtggcgtgcgccccgcgccgtgggggcgggaacccccgggcgcctgtggggtggtgtccgcgctcgcccccgcgtgggcggcgcgcgcctccccgtggtgtgaaaccttccgacccctctccggagtccggtcccgtttgctgtctcgtctggccggcctgaggcaaccccctctcctcttgggcgggggggggggggacgtgccgcgccaggaagggcctcctcccggtgcgtcgtcgggagcgccctcgccaaatcgacctcgtacgactcttagcggtggatcactcggctcgtgcgtcgatgaagaacgcagctagctgcgagaattaatgtgaattgcaggacacattgatcatcgacacttcgaacgcacttgcggccccgggttcctcccggggctacgcctgtctgagcgtcgcttgccgatcaatcgcccccgggggtgcctccgggctcctcggggtgcgcggctgggggttccctcgcagggcccgccgggggccctccgtccccctaagcgcagacccggcggcgtccgccctcctcttgccgccgcgcccgccccttccccctccccccgcgggccctgcgtggtcacgcgtcgggtggcgggggggagaggggggcgcgcccggctgagagagacggggagggcggcgccgccgccgcccgcgaagacggagagggaaagagagagccggctcgggccgagttcccgtggccgccgcctgcggtccgggttcctccctcggtggggctccctcgcgccgcgcgcggctcgggggtcggggttcgtcggccccggccgggtggaaggtcccgtgcccgtcgtcgtcgtcgtcgtcgcgcgtcgtcggcggtgggggcgtgttgcgtgcggtgtggtggtgggggaggaggaaggcgggtccggaaggggaagggtgccggcggggagagagggtcgggggagcgcgtcccggtcgccgcggttcgccgcccgcccccggtggcggcccggcgtccggccgaccgccgctcccgcgcccctcctcctccccgccgcccctcctccgaggccccgccgtcctacctcgccctccccgcgcgtacgcgcgcgcgcccgcccgcccggctcgcctcgcggcgcgtcggccggggccgggagcccgccccgcggcccgcccggccgcgcccgtggccgcggcgccggggttcgcgtgtccccggcggcgacccgcgagacgccgcggtgtcgtccgccgtcgcgcgcccgcctccggctcgcggccgcgccgcgccgcgccggggccccgtcccgagcttccgcgtcggggcggggcggctccgccgccgcgtcctcggacccgtccccccgacctccgcgggggagacgggtcggggcgtgcggcgcccgtcccgcccccggcccgtgcccctccctccggtcgtcccgctccggcggggcggcgcgggggtgccgccggccgcgcgctctctctcccgtcgcctctccccctcgccgggcccgtctcccgacggagcgtcgggcgggcggtcgggccggcgcgattccgtccgtccgtccgccgagcggcccgtccccctccgagacgcgacctcagatcagacgtggcgacccgctgaatttaagcatattagtcagcggaggaaaagacactaaccaggattccctcagtaacggcgagtgaacagggaagagcccagcgccgaatccccgccccgcggcggggcgcgggacatgtggcgtacggaagacccgctccccggcgccgctcgtggggggcccaagtccttctgatcgaggcccagcccgtggacggtgtgaggccggtagcggcccccggcgcgccgggcccgggtcttcccggagtcgggttgcttgggaatgcagcccaaagcgggtggtaaactccatctaaggctaaataccggcacgagaccgatagtcaacaagtaccgtaagggaaagttgaaaagaactttgaagagagagttcaagagggcgtgaaaccgttaagaggtaaacgggtggggtccgcgcagtaaaggggcggaggattcaacccggcggcgggtccggccgtgtcgccggcccggcggatctttcccgccccccgttcctcccgacccctccacccgccctcccttcccccgccgcccctcctcctcctccccggagggggcgggctccggcgggtgcgggggtgggcgggcggggccgggggtggggtcggcgggggaccgtcccccgaccggcgaccggccgccgccgggcgcatttccaccgcggcggtgcgccgcgaccggctccgggacggctgggaaggcccggcggggaaggtggctcggggggccccgtccgtccgtccgtccgtcctcctcctcccccgtctccgccccccggccccgcgtcctccctcgggagggcgcgcgggtcggggcggcggcggcggcggcggtggcggcggcggcggcggcggcgggaccgaaaccccccccgagtgttacagcccccccggcagcagcactcgccgaatcccggggccgagggagcgagacccgtcgccgcgctctcccccctcccggcgcccacccccgcggggaatcccccgcgaggggggtctcccccgcgggggcgcgccggcgtctcctcgtgggggggccgggccacccctcccacggcgcgaccgctctcccacccctcctccccgcgcccccgccccggcgacggggggggtgccgcgcgcgggtcggttagcggggcggactgtccccagtgcgccccgggcgggtcgcgccgtcgggcccggggggaggttctctcggggccacgcgcgcgtcccccgaagagggggacggcggagcgagcgcacggggtcggcggcgacgtcggctacccacccgacccgtcttgaaacacggaccaaggagtctaacacgtgcgcgagtcgggggctcgcacgaaagccgccgtggcgcaatgaaggtgaaggccggcgcgctcgccggccgaggtgggatcccgaggcctctccagtccgccgagggcgcaccaccggcccgtctcgcccgccgcgccggggaggtggagcacgagcgcacgtgttaggacccgaaagatggtgaactatgcctgggcagggcgaagccagaggaaactctggtggaggtccgtagcggtcctgacgtgcaaatcggtcgtccgacctgggtataggggcgaaagactaatcgaaccatctagtagctggttccctccgaagtttccctcaggatagctggcgctctcgcagacccgacgcacccccgccacgcagttttatccggtaaagcgaatgattagaggtcttggggccgaaacgatctcaacctattctcaaactttaaatgggtaagaagcccggctcgctggcgtggagccgggcgtggaatgcgagtgcctagtgggccacttttggtaagcagaactggcgctgcgggatgaaccgaacgccgggttaaggcgcccgatgccgacgctcatcagaccccagaaaaggtgttggttgatatagacagcaggacggtggccatggaagtcggaatccgctaaggagtgtgtaacaactcacctgccgaatcaactagccctgaaaatggatggcgctggagcgtcgggcccatacccggccgtcgccggcagtcgagagtggacgggagcggcgggggcggcgcgcgcgcgcgcgcgtgtggtgtgcgtcggagggcggcggcggcggcgggggtgtgtggggtcctcccccgccccccccccacgcctcctcccctcctcccgcccacgccccgctccccgcccccggagccccgcggacgctacgccgcgacgagtaggagggccgctgcggtgagccttgaagcctagggcgcgggcccgggtggagccgccgcaggtgcagatcttggtggtagtagcaaatattcaaacgagaactttgaaggccgaagtggagaagggttccatgtgaacagcagttgaacatgggtcagtcggtcctgagagatgggcgagcgccgttccgaagggacgggcgatggcctccgttgccctcggccgatcgaaagggagtcgggttcagatccccgaatccggagtggcggagatgggcgccgcgaggcgtccagtgcggtaacgcgaccgatcccggagaagccggcgggagccccggggagagttctcttttctttgtgaagggcagggcgccctggaatgggttcgccccgagagaggggcccgtgccttggaaagcgtcgcggttccggcggcgtccggtgagctctcgctggcccttgaaaatccgggggagagggtgtaaatctcgcgccgggccgtacccatatccgcagcaggtctccaaggtgaacagcctctggcatgttggaacaatgtaggtaagggaagtcggcaagccggatcnnnnnnnnnnnnnnnnnnnnnnnnnnnnnnnnnnnnnnnnnnnnnnnnnnnnnnnnnnnnnnnnnnnnnnnnnnnnnnnnnnnnnnnnnnnnnnnnnnnnnnnnnnnnnnnnnnnnnnnnnnnnnnnnnnnnnnnnnnnnnnnnnnnnnnnnnnnnnnnnnnnnnnnnnnnnnnnnnnnnnnnnnnnnnnnnnnnnnnnnnnnnnnnnnnnnnnnnnnnnnnnnnnnnnnnnnnnnnnnnnnnnnnnnnnnnnnnnnnnnnnnnnnnnnnnnnnnnnnnnnnnnnnnnnnnnnnnnnnnnnnnnnnnnnnnnnnnnnnnnnnnnnnnnnnnnnnnnnnnnnnnnnnnnnnnnnnnnnnnnnnnnnnnnnnnnnnnnnnnnnnnnnnnnnnnnnnnnnnnnnnnnnnnnnnnnnnnnnnnnnnnnnnnnnnnnnnnnnnnnnnnnnnnnnnnnnnnnnnnnnnnnnnnnnnnnnnnnnnnnnnnnnnnnnnnnnnnnnnnnnnnnnnnnnnnnnnnnnnnnnnnnnnnnnnnnnnnnnnnnnnnnnnnnnnnnnnnnnnnnnnnnnnnnnnnnnnnnnnnnnnnnnnnnnnnnnnnnnnnnnnnnnnnnnnnnnnnnnnnnnnnnnnnnnnnnnnnnnnnnnnnnnnnnnnnnnnnnnnnnnnnnnnnnnnnnnnnnnnnnnnnnnnnnnnnnnnnnnnnnnnnnnnnnnnnnnnnnnnnnnnnnnnnnnnnnnnnnnnnnnnnnnnnnnnnnnnnnnnnnnnnnnnnnnnnnnnnnnnnnnnnnnnnnnnnnnnnnnnnnnnnnnnnnnnnnnnnnnnnnnnnnnnnnnnnnnnnnnnnnnnnnnnnnnnnnnnnnnnnnnnnnnnnnnnnnnnnnnnnnnnnnnnnnnnnnnnnnnnnnnnnnnnnnnnnnnnnnnnnnnnnnnnnnnnnnnnnnnnnnnnnnnnnnnnnnnnnnnnnnnnnnnnnnnnnnnnnnnnnnnnnnnnnnnnnnnnnnnnnnnnnnnnnnnnnnnnnnnnnnnnnnnnnnnnnnnnnnnnnnnnnnnnnnnnnnnnnnnnnnnnnnnnnnnnnnnnnnnnnnnnnnnnnnnnnnnnnnnnnnnnnnnnnnnnnnnnnnnnnnnnnnnnnnnnnnnnnnnnnnnnnnnnnnnnnnnnnnnnnnnnnnnnnnnnnnnnnnnnnnnnnnnnnnnnnnnnnnnnnnnnnnnnnnnnnnnnnnnnnnnnnnnnnnnnnnnnnnnnnnnnnnnnnnnnnnnnnnnnnnnnnnnnnnnnnnnnnnnnnnnnnnnnnnnnnnnnnnnnnnnnnnnnnnnnnnnnnnnnnnnnnnnnnnnnnnnnnnnnnnnnnnnnnnnnnnnnnnnnnnnnnnnnnnnnnnnnnnnnnnnnnnnnnnnnnnnnnnnnnnnnnnnnnnnnnnnnnnnnnnnnnnnnnnnnnnnnnnnnnnnnnnnnnnnnnnnnnnnnnnnnnnnnnnnnnnnnnnnnnnnnnnnnnnnnnnnnnnnnnnnnnnnnnnnnnnnnnnnnnnnnnnnnnnnnnnnnnnnnnnnnnnnnnnnnnnnnnnnnnnnnnnnnnnnnnnnnnnnnnnnnnnnnnnnnnnnnnnnnnnnnnnnnnnnnnnnnnnnnnnnnnnnnnnnnnnnnnnnnnnnnnnnnnnnnnnnnnnnnnnnnnnnnnnnnnnnnnnnnnnnnnnnnnnnnnnnnnnnnnnnnnnnnnnnnnnnnnnnnnnnnnnnnnnnnnnnnnnnnnnnnnnnnnnnnnnnnnnnnnnnnnnnnnnnnnnnnnnnnnnnnnnnnnnnnnnnnnnnnnnnnnnnnnnnnnnnnnnnnnnnnnnnnnnnnnnnnnnnnnnnnnnnnnnnnnnnnnnnnnnnnnnnnnnnnnnnnnnnnnnnnnnnnnnnnnnnnnnnnnnnnnnnnnnnnnnnnnnnnnnnnnnnnnnnnnnnnnnnnnnnnnnnnnnnnnnnnnnnnnnnnnnnnnnnnnnnnnnnnnnnnnnnnnnnnnnnnnnnnnnnnnnnnnnnnnnnnnnnnnnnnnnnnnnnnnnnnnnnnnnnnnnnnnnnnnnnnnnnnnnnnnnnnnnnnnnnnnnnnnnnnnnnnnnnnnnnnnnnnnnnnnnnnnnnnnnnnnnnnnnnnnnnnnnnnnnnnnnnnnnnnnnnnnnnnnnnnnnnnnnnnnnnnnnnnnnnnnnnnnnnnnnnnnnnnnnnnnnnnnnnnnnnnnnnnnnnnnnnnnnnnnnnnnnnnnnnnnnnnnnnnnnnnnnnnnnnnnnnnnnnnnnnnnnnnnnnnnnnnnnnnnnnnnnnnnnnnnnnnnnnnnnnnnnnnnnnnnnnnnnnnnnnnnnnnnnnnnnnnnnnnnnnnnnnnnnnnnnnnnnnnnnnnnnnnnnnnnnnnnnnnnnnnnnnnnnnnnnnnnnnnnnnnnnnnnnnnnnnnnnnnnnnnnnnnnnnnnnnnnnnnnnnnnnnnnnnnnnnnnnnnnnnnnnnnnnnnnnnnnnnnnnnnnnnnnnnnnnnnnnnnnnnnnnnnnnnnnnnnnnnnnnnnnnnnnnnnnnnnnnnnnnnnnnnnnnnnnnnnnnnnnnnnnnnnnnnnnnnnnnnnnnnnnnnnnnnnnnnnnnnnnnnnnnnnnnnnnnnnnnnnnnnnnnnnnnnnnnnnnnnnnnnnnnnnnnnnnnnnnnnnnnnnnnnnnnnnnnnnnnnnnnnnnnnnnnnnnnnnnnnnnnnnnnnnnnnnnnnnnnnnnnnnnnnnnnnnnnnnnnnnnnnnnnnnnnnnnnnnnnnnnnnnnnnnnnnnnnnnnnnnnnnnnnnnnnnnnnnnnnnnnnnnnnnnnnnnnnnnnnnnnnnnnnnnnnnnnnnnnnnnnnnnnnnnnnnnnnnnnnnnnnnnnnnnnnnnnnnnnnnnnnnnnnnnnnnnnnnnnnnnnnnnnnnnnnnnnnnnnnnnnnnnnnnnnnnnnnnnnnnnnnnnnnnnnnnnnnnnnnnnnnnnnnnnnnnnnnnnnnnnnnnnnnnnnnnnnnnnnnnnnnnnnnnnnnnnnnnnnnnnnnnnnnnnnnnnnnnnnnnnnnnnnnnnnnnnnnnnnnnnnnnnnnnnnnnnnnnnnnnnnnnnnnnnnnnnnnnnnnnnnnnnnnnnnnnnnnnnnnnnnnnnnnnnnnnnnnnnnnnnnnnnnnnnnnnnnnnnnnnnnnnnnnnnnnnnnnnnnnnnnnnnnnnnnnnnnnnnnnnnnnnnnnnnnnnnnnnnnnnnnnnnnnnnnnnnnnnnnnnnnnnnnnnnnnnnnnnnnnnnnnnnnnnnnnnnnnnnnnnnnnnnnnnnnnnnnnnnnnnnnnnnnnnnnnnnnnnnnnnnnnnnnnnnnnnnnnnnnnnnnnnnnnnnnnnnnnnnnnnnnnnnnnnnnnnnnnnnnnnnnnnnnnnnnnnnnnnnnnnnnnnnnnnnnnnnnnnnnnnnnnnnnnnnnnnnnnnnnnnnnnnnnnnnnnnnnnnnnnnnnnnnnnnnnnnnnnnnnnnnnnnnnnnnnnnnnnnnnnnnnnnnnnnnnnnnnnnnnnnnnnnnnnnnnnnnnnnnnnnnnnnnnnnnnnnnnnnnnnnnnnnnnnnnnnnnnnnnnnnnnnnnnnnnnnnnnnnnnnnnnnnnnnnnnnnnnnnnnnnnnnnnnnnnnnnnnnnnnnnnnnnnnnnnnnnnnnnnnnnnnnnnnnnnnnnnnnnnnnnnnnnnnnnnnnnnnnnnnnnnnnnnnnnnnnnnnnnnnnnnnnnnnnnnnnnnnnnnnnnnnnnnnnnnnnnnnnnnnnnnnnnnnnnnnnnnnnnnnnnnnnnnnnnnnnnnnnnnnnnnnnnnnnnnnnnnnnnnnnnnnnnnnnnnnnnnnnnnnnnnnnnnnnnnnnnnnnnnnnnnnnnnnnnnnnnnnnnnnnnnnnnnnnnnnnnnnnnnnnnnnnnnnnnnnnnnnnnnnnnnnnnnnnnnnnnnnnnnnnnnnnnnnnnnnnnnnnnnnnnnnnnnnnnnnnnnnnnnnnnnnnnnnnnnnnnnnnnnnnnnnnnnnnnnnnnnnnnnnnnnnnnnnnnnnnnnnnnnnnnnnnnnnnnnnnnnnnnnnnnnnnnnnnnnnnnnnnnnnnnnnnnnnnnnnnnnnnnnnnnnnnnnnnnnnnnnnnnnnnnnnnnnnnnnnnnnnnnnnnnnnnnnnnnnnnnnnnnnnnnnnnnnnnnnnnnnnnnnnnnnnnnnnnnnnnnnnnnnnnnnnnnnnnnnnnnnnnnnnnnnnnnnnnnnnnnnnnnnnnnnnnnnnnnnnnnnnnnnnnnnnnnnnnnnnnnnnnnnnnnnnnnnnnnnnnnnnnnnnnnnnnnnnnnnnnnnnnnnnnnnnnnnnnnnnnnnnnnnnnnnnnnnnnnnnnnnnnnnnnnnnnnnnnnnnnnnnnnnnnnnnnnnnnnnnnnnnnnnnnnnnnnnnnnnnnnnnnnnnnnnnnnnnnnnnnnnnnnnnnnnnnnnnnnnnnnnnnnnnnnnnnnnnnnnnnnnnnnnnnnnnnnnnnnnnnnnnnnnnnnnnnnnnnnnnnnnnnnnnnnnnnnnnnnnnnnnnnnnnnnnnnnnnnnnnnnnnnnnnnnnnnnnnnnnnnnnnnnnnnnnnnnnnnnnnnnnnnnnnnnnnnnnnnnnnnnnnnnnnnnnnnnnnnnnnnnnnnnnnnnnnnnnnnnnnnnnnnnnnnnnnnnnnnnnnnnnnnnnnnnnnnnnnnnnnnnnnnnnnnnnnnnnnnnnnnnnnnnnnnnnnnnnnnnnnnnnnnnnnnnnnnnnnnnnnnnnnnnnnnnnnnnnnnnnnnnnnnnnnnnnnnnnnnnnnnnnnnnnnnnnnnnnnnnnnnnnnnnnnnnnnnnnnnnnnnnnnnnnnnnnnnnnnnnnnnnnnnnnnnnnnnnnnnnnnnnnnnnnnnnnnnnnnnnnnnnnnnnnnnnnnnnnnnnnnnnnnnnnnnnnnnnnnnnnnnnnnnnnnnnnnnnnnnnnnnnnnnnnnnnnnnnnnnnnnnnnnnnnnnnnnnnnnnnnnnnnnnnnnnnnnnnnnnnnnnnnnnnnnnnnnnnnnnnnnnnnnnnnnnnnnnnnnnnnnnnnnnnnnnnnnnnnnnnnnnnnnnnnnnnnnnnnnnnnnnnnnnnnnnnnnnnnnnnnnnnnnnnnnnnnnnnnnnnnnnnnnnnnnnnnnnnnnnnnnnnnnnnnnnnnnnnnnnnnnnnnnnnnnnnnnnnnnnnnnnnnnnnnnnnnnnnnnnnnnnnnnnnnnnnnnnnnnnnnnnnnnnnnnnnnnnnnnnnnnnnnnnnnnnnnnnnnnnnnnnnnnnnnnnnnnnnnnnnnnnnnnnnnnnnnnnnnnnnnnnnnnnnnnnnnnnnnnnnnnnnnnnnnnnnnnnnnnnnnnnnnnnnnnnnnnnnnnnnnnnnnnnnnnnnnnnnnnnnnnnnnnnnnnnnnnnnnnnnnnnnnnnnnnnnnnnnnnnnnnnnnnnnnnnnnnnnnnnnnnnnnnnnnnnnnnnnnnnnnnnnnnnnnnnnnnnnnnnnnnnnnnnnnnnnnnnnnnnnnnnnnnnnnnnnnnnnnnnnnnnnnnnnnnnnnnnnnnnnnnnnnnnnnnnnnnnnnnnnnnnnnnnnnnnnnnnnnnnnnnnnnnnnnnnnnnnnnnnnnnnnnnnnnnnnnnnnnnnnnnnnnnnnnnnnnnnnnnnnnnnnnnnnnnnnnnnnnnnnnnnnnnnnnnnnnnnnnnnnnnnnnnnnnnnnnnnnnnnnnnnnnnnnnnnnnnnnnnnnnnnnnnnnnnnnnnnnnnnnnnnnnnnnnnnnnnnnnnnnnnnnnnnnnnnnnnnnnnnnnnnnnnnnnnnnnnnnnnnnnnnnnnnnnnnnnnnnnnnnnnnnnnnnnnnnnnnnnnnnnnnnnnnnnnnnnnnnnnnnnnnnnnnnnnnnnnnnnnnnnnnnnnnnnnnnnnnnnnnnnnnnnnnnnnnnnnnnnnnnnnnnnnnnnnnnnnnnnnnnnnnnnnnnnnnnnnnnnnnnnnnnnnnnnnnnnnnnnnnnnnnnnnnnnnnnnnnnnnnnnnnnnnnnnnnnnnnnnnnnnnnnnnnnnnnnnnnnnnnnnnnnnnnnnnnnnnnnnnnnnnnnnnnnnnnnnnnnnnnnnnnnnnnnnnnnnnnnnnnnnnnnnnnnnnnnnnnnnnnnnnnnnnnnnnnnnnnnnnnnnnnnnnnnnnnnnnnnnnnnnnnnnnnnnnnnnnnnnnnnnnnnnnnnnnnnnnnnnnnnnnnnnnnnnnnnnnnnnnnnnnnnnnnnnnnnnnnnnnnnnnnnnnnnnnnnnnnnnnnnnnnnnnnnnnnnnnnnnnnnnnnnnnnnnnnnnnnnnnnnnnnnnnnnnnnnnnnnnnnnnnnnnnnnnnnnnnnnnnnnnnnnnnnnnnnnnnnnnnnnnnnnnnnnnnnnnnnnnnnnnnnnnnnnnnnnnnnnnnnnnnnnnnnnnnnnnnnnnnnnnnnnnnnnnnnnnnnnnnnnnnnnnnnnnnnnnnnnnnnnnnnnnnnnnnnnnnnnnnnnnnnnnnnnnnnnnnnnnnnnnnnnnnnnnnnnnnnnnnnnnnnnnnnnnnnnnnnnnnnnnnnnnnnnnnnnnnnnnnnnnnnnnnnnnnnnnnnnnnnnnnnnnnnnnnnnnnnnnnnnnnnnnnnnnnnnnnnnnnnnnnnnnnnnnnnnnnnnnnnnnnnnnnnnnnnnnnnnnnnnnnnnnnnnnnnnnnnnnnnnnnnnnnnnnnnnnnnnnnnnnnnnnnnnnnnnnnnnnnnnnnnnnnnnnnnnnnnnnnnnnnnnnnnnnnnnnnnnnnnnnnnnnnnnnnnnnnnnnnnnnnnnnnnnnnnnnnnnnnnnnnnnnnnnnnnnnnnnnnnnnnnnnnnnnnnnnnnnnnnnnnnnnnnnnnnnnnnnnnnnnnnnnnnnnnnnnnnnnnnnnnnnnnnnnnnnnnnnnnnnnnnnnnnnnnnnnnnnnnnnnnnnnnnnnnnnnnnnnnnnnnnnnnnnnnnnnnnnnnnnnnnnnnnnnnnnnnnnnnnnnnnnnnnnnnnnnnnnnnnnnnnnnnnnnnnnnnnnnnnnnnnnnnnnnnnnnnnnnnnnnnnnnnnnnnnnnnnnnnnnnnnnnnnnnnnnnnnnnnnnnnnnnnnnnnnnnnnnnnnnnnnnnnnnnnnnnnnnnnnnnnnnnnnnnnnnnnnnnnnnnnnnnnnnnnnnnnnnnnnnnnnnnnnnnnnnnnnnnnnnnnnnnnnnnnnnnnnnnnnnnnnnnnnnnnnnnnnnnnnnnnnnnnnnnnnnnnnnnnnnnnnnnnnnnnnnnnnnnnnnnnnnnnnnnnnnnnnnnnnnnnnnnnnnnnnnnnnnnnnnnnnnnnnnnnnnnnnnnnnnnnnnnnnnnnnnnnnnnnnnnnnnnnnnnnnnnnnnnnnnnnnnnnnnnnnnnnnnnnnnnnnnnnnnnnnnnnnnnnnnnnnnnnnnnnnnnnnnnnnnnnnnnnnnnnnnnnnnnnnnnnnnnnnnnnnnnnnnnnnnnnnnnnnnnnnnnnnnnnnnnnnnnnnnnnnnnnnnnnnnnnnnnnnnnnnnnnnnnnnnnnnnnnnnnnnnnnnnnnnnnnnnnnnnnnnnnnnnnnnnnnnnnnnnnnnnnnnnnnnnnnnnnnnnnnnnnnnnnnnnnnnnnnnnnnnnnnnnnnnnnnnnnnnnnnnnnnnnnnnnnnnnnnnnnnnnnnnnnnnnnnnnnnnnnnnnnnnnnnnnnnnnnnnnnnnnnnnnnnnnnnnnnnnnnnnnnnnnnnnnnnnnnnnnnnnnnnnnnnnnnnnnnnnnnnnnnnnnnnnnnnnnnnnnnnnnnnnnnnnnnnnnnnnnnnnnnnnnnnnnnnnnnnnnnnnnnnnnnnnnnnnnnnnnnnnnnnnnnnnnnnnnnnnnnnnnnnnnnnnnnnnnnnnnnnnnnnnnnnnnnnnnnnnnnnnnnnnnnnnnnnnnnnnnnnnnnnnnnnnnnnnnnnnnnnnnnnnnnnnnnnnnnnnnnnnnnnnnnnnnnnnnnnnnnnnnnnnnnnnnnnnnnnnnnnnnnnnnnnnnnnnnnnnnnnnnnnnnnnnnnnnnnnnnnnnnnnnnnnnnnnnnnnnnnnnnnnnnnnnnnnnnnnnnnnnnnnnnnnnnnnnnnnnnnnnnnnnnnnnnnnnnnnnnnnnnnnnnnnnnnnnnnnnnnnnnnnnnnnnnnnnnnnnnnnnnnnnnnnnnnnnnnnnnnnnnnnnnnnnnnnnnnnnnnnnnnnnnnnnnnnnnnnnnnnnnnnnnnnnnnnnnnnnnnnnnnnnnnnnnnnnnnnnnnnnnnnnnnnnnnnnnnnnnnnnnnnnnnnnnnnnnnnnnnnnnnnnnnnnnnnnnnnnnnnnnnnnnnnnnnnnnnnnnnnnnnnnnnnnnnnnnnnnnnnnnnnnnnnnnnnnnnnnnnnnnnnnnnnnnnnnnnnnnnnnnnnnnnnnnnnnnnnnnnnnnnnnnnnnnnnnnnnnnnnnnnnnnnnnnnnnnnnnnnnnnnnnnnnnnnnnnnnnnnnnnnnnnnnnnnnnnnnnnnnnnnnnnnnnnnnnnnnnnnnnnnnnnnnnnnnnnnnnnnnnnnnnnnnnnnnnnnnnnnnnnnnnnnnnnnnnnnnnnnnnnnnnnnnnnnnnnnnnnnnnnnnnnnnnnnnnnnnnnnnnnnnnnnnnnnnnnnnnnnnnnnnnnnnnnnnnnnnnnnnnnnnnnnnnnnnnnnnnnnnnnnnnnnnnnnnnnnnnnnnnnnnnnnnnnnnnnnnnnnnnnnnnnnnnnnnnnnnnnnnnnnnnnnnnnnnnnnnnnnnnnnnnnnnnnnnnnnnnnnnnnnnnnnnnnnnnnnnnnnnnnnnnnnnnnnnnnnnnnnnnnnnnnnnnnnnnnnnnnnnnnnnnnnnnnnnnnnnnnnnnnnnnnnnnnnnnnnnnnnnnnnnnnnnnnnnnnnnnnnnnnnnnnnnnnnnnnnnnnnnnnnnnnnnnnnnnnnnnnnnnnnnnnnnnnnnnnnnnnnnnnnnnnnnnnnnnnnnnnnnnnnnnnnnnnnnnnnnnnnnnnnnnnnnnnnnnnnnnnnnnnnnnnnnnnnnnnnnnnnnnnnnnnnnnnnnnnnnnnnnnnnnnnnnnnnnnnnnnnnnnnnnnnnnnnnnnnnnnnnnnnnnnnnnnnnnnnnnnnnnnnnnnnnnnnnnnnnnnnnnnnnnnnnnnnnnnnnnnnnnnnnnnnnnnnnnnnnnnnnnnnnnnnnnnnnnnnnnnnnnnnnnnnnnnnnnnnnnnnnnnnnnnnnnnnnnnnnnnnnnnnnnnnnnnnnnnnnnnnnnnnnnnnnnnnnnnnnnnnnnnnnnnnnnnnnnnnnnnnnnnnnnnnnnnnnnnnnnnnnnnnnnnnnnnnnnnnnnnnnnnnnnnnnnnnnnnnnnnnnnnnnnnnnnnnnnnnnnnnnnnnnnnnnnnnnnnnnnnnnnnnnnnnnnnnnnnnnnnnnnnnnnnnnnnnnnnnnnnnnnnnnnnnnnnnnnnnnnnnnnnnnnnnnnnnnnnnnnnnnnnnnnnnnnnnnnnnnnnnnnnnnnnnnnnnnnnnnnnnnnnnnnnnnnnnnnnnnnnnnnnnnnnnnnnnnnnnnnnnnnnnnnnnnnnnnnnnnnnnnnnnnnnnnnnnnnnnnnnnnnnnnnnnnnnnnnnnnnnnnnnnnnnnnnnnnnnnnnnnnnnnnnnnnnnnnnnnnnnnnnnnnnnnnnnnnnnnnnnnnnnnnnnnnnnnnnnnnnnnnnnnnnnnnnnnnnnnnnnnnnnnnnnnnnnnnnnnnnnnnnnnnnnnnnnnnnnnnnnnnnnnnnnnnnnnnnnnnnnnnnnnnnnnnnnnnnnnnnnnnnnnnnnnnnnnnnnnnnnnnnnnnnnnnnnnnnnnnnnnnnnnnnnnnnnnnnnnnnnnnnnnnnnnnnnnnnnnnnnnnnnnnnnnnnnnnnnnnnnnnnnnnnnnnnnnnnnnnnnnnnnnnnnnnnnnnnnnnnnnnnnnnnnnnnnnnnnnnnnnnnnnnnnnnnnnnnnnnnnnnnnnnnnnnnnnnnnnnnnnnnnnnnnnnnnnnnnnnnnnnnnnnnnnnnnnnnnnnnnnnnnnnnnnnnnnnnnnnnnnnnnnnnnnnnnnnnnnnnnnnnnnnnnnnnnnnnnnnnnnnnnnnnnnnnnnnnnnnnnnnnnnnnnnnnnnnnnnnnnnnnnnnnnnnnnnnnnnnnnnnnnnnnnnnnnnnnnnnnnnnnnnnnnnnnnnnnnnnnnnnnnnnnnnnnnnnnnnnnnnnnnnnnnnnnnnnnnnnnnnnnnnnnnnnnnnnnnnnnnnnnnnnnnnnnnnnnnnnnnnnnnnnnnnnnnnnnnnnnnnnnnnnnnnnnnnnnnnnnnnnnnnnnnnnnnnnnnnnnnnnnnnnnnnnnnnnnnnnnnnnnnnnnnnnnnnnnnnnnnnnnnnnnnnnnnnnnnnnnnnnnnnnnnnnnnnnnnnnnnnnnnnnnnnnnnnnnnnnnnnnnnnnnnnnnnnnnnnnnnnnnnnnnnnnnnnnnnnnnnnnnnnnnnnnnnnnnnnnnnnnnnnnnnnnnnnnnnnnnnnnnnnnnnnnnnnnnnnnnnnnnnnnnnnnnnnnnnnnnnnnnnnnnnnnnnnnnnnnnnnnnnnnnnnnnnnnnnnnnnnnnnnnnnnnnnnnnnnnnnnnnnnnnnnnnnnnnnnnnnnnnnnnnnnnnnnnnnnnnnnnnnnnnnnnnnnnnnnnnnnnnnnnnnnnnnnnnnnnnnnnnnnnnnnnnnnnnnnnnnnnnnnnnnnnnnnnnnnnnnnnnnnnnnnnnnnnnnnnnnnnnnnnnnnnnnnnnnnnnnnnnnnnnnnnnnnnnnnnnnnnnnnnnnnnnnnnnnnnnnnnnnnnnnnnnnnnnnnnnnnnnnnnnnnnnnnnnnnnnnnnnnnnnnnnnnnnnnnnnnnnnnnnnnnnnnnnnnnnnnnnnnnnnnnnnnnnnnnnnnnnnnnnnnnnnnnnnnnnnnnnnnnnnnnnnnnnnnnnnnnnnnnnnnnnnnnnnnnnnnnnnnnnnnnnnnnnnnnnnnnnnnnnnnnnnnnnnnnnnnnnnnnnnnnnnnnnnnnnnnnnnnnnnnnnnnnnnnnnnnnnnnnnnnnnnnnnnnnnnnnnnnnnnnnnnnnnnnnnnnnnnnnnnnnnnnnnnnnnnnnnnnnnnnnnnnnnnnnnnnnnnnnnnnnnnnnnnnnnnnnnnnnnnnnnnnnnnnnnnnnnnnnnnnnnnnnnnnnnnnnnnnnnnnnnnnnnnnnnnnnnnnnnnnnnnnnnnnnnnnnnnnnnnnnnnnnnnnnnnnnnnnnnnnnnnnnnnnnnnnnnnnnnnnnnnnnnnnnnnnnnnnnnnnnnnnnnnnnnnnnnnnnnnnnnnnnnnnnnnnnnnnnnnnnnnnnnnnnnnnnnnnnnnnnnnnnnnnnnnnnnnnnnnnnnnnnnnnnnnnnnnnnnnnnnnnnnnnnnnnnnnnnnnnnnnnnnnnnnnnnnnnnnnnnnnnnnnnnnnnnnnnnnnnnnnnnnnnnnnnnnnnnnnnnnnnnnnnnnnnnnnnnnnnnnnnnnnnnnnnnnnnnnnnnnnnnnnnnnnnnnnnnnnnnnnnnnnnnnnnnnnnnnnnnnnnnnnnnnnnnnnnnnnnnnnnnnnnnnnnnnnnnnnnnnnnnnnnnnnnnnnnnnnnnnnnnnnnnnnnnnnnnnnnnnnnnnnnnnnnnnnnnnnnnnnnnnnnnnnnnnnnnnnnnnnnnnnnnnnnnnnnnnnnnnnnnnnnnnnnnnnnnnnnnnnnnnnnnnnnnnnnnnnnnnnnnnnnnnnnnnnnnnnnnnnnnnnnnnnnnnnnnnnnnnnnnnnnnnnnnnnnnnnnnnnnnnnnnnnnnnnnnnnnnnnnnnnnnnnnnnnnnnnnnnnnnnnnnnnnnnnnnnnnnnnnnnnnnnnnnnnnnnnnnnnnnnnnnnnnnnnnnnnnnnnnnnnnnnnnnnnnnnnnnnnnnnnnnnnnnnnnnnnnnnnnnnnnnnnnnnnnnnnnnnnnnnnnnnnnnnnnnnnnnnnnnnnnnnnnnnnnnnnnnnnnnnnnnnnnnnnnnnnnnnnnnnnnnnnnnnnnnnnnnnnnnnnnnnnnnnnnnnnnnnnnnnnnnnnnnnnnnnnnnnnnnnnnnnnnnnnnnnnnnnnnnnnnnnnnnnnnnnnnnnnnnnnnnnnnnnnnnnnnnnnnnnnnnnnnnnnnnnnnnnnnnnnnnnnnnnnnnnnnnnnnnnnnnnnnnnnnnnnnnnnnnnnnnnnnnnnnnnnnnnnnnnnnnnnnnnnnnnnnnnnnnnnnnnnnnnnnnnnnnnnnnnnnnnnnnnnnnnnnnnnnnnnnnnnnnnnnnnnnnnnnnnnnnnnnnnnnnnnnnnnnnnnnnnnnnnnnnnnnnnnnnnnnnnnnnnnnnnnnnnnnnnnnnnnnnnnnnnnnnnnnnnnnnnnnnnnnnnnnnnnnnnnnnnnnnnnnnnnnnnnnnnnnnnnnnnnnnnnnnnnnnnnnnnnnnnnnnnnnnnnnnnnnnnnnnnnnnnnnnnnnnnnnnnnnnnnnnnnnnnnnnnnnnnnnnnnnnnnnnnnnnnnnnnnnnnnnnnnnnnnnnnnnnnnnnnnnnnnnnnnnnnnnnnnnnnnnnnnnnnnnnnnnnnnnnnnnnnnnnnnnnnnnnnnnnnnnnnnnnnnnnnnnnnnnnnnnnnnnnnnnnnnnnnnnnnnnnnnnnnnnnnnnnnnnnnnnnnnnnnnnnnnnnnnnnnnnnnnnnnnnnnnnnnnnnnnnnnnnnnnnnnnnnnnnnnnnnnnnnnnnnnnnnnnnnnnnnnnnnnnnnnnnnnnnnnnnnnnnnnnnnnnnnnnnnnnnnnnnnnnnnnnnnnnnnnnnnnnnnnnnnnnnnnnnnnnnnnnnnnnnnnnnnnnnnnnnnnnnnnnnnnnnnnnnnnnnnnnnnnnnnnnnnnnnnnnnnnnnnnnnnnnnnnnnnnnnnnnnnnnnnnnnnnnnnnnnnnnnnnnnnnnnnnnnnnnnnnnnnnnnnnnnnnnnnnnnnnnnnnnnnnnnnnnnnnnnnnnnnnnnnnnnnnnnnnnnnnnnnnnnnnnnnnnnnnnnnnnnnnnnnnnnnnnnnnnnnnnnnnnnnnnnnnnnnnnnnnnnnnnnnnnnnnnnnnnnnnnnnnnnnnnnnnnnnnnnnnnnnnnnnnnnnnnnnnnnnnnnnnnnnnnnnnnnnnnnnnnnnnnnnnnnnnnnnnnnnnnnnnnnnnnnnnnnnnnnnnnnnnnnnnnnnnnnnnnnnnnnnnnnnnnnnnnnnnnnnnnnnnnnnnnnnnnnnnnnnnnnnnnnnnnnnnnnnnnnnnnnnnnnnnnnnnnnnnnnnnnnnnnnnnnnnnnnnnnnnnnnnnnnnnnnnnnnnnnnnnnnnnnnnnnnnnnnnnnnnnnnnnnnnnnnnnnnnnnnnnnnnnnnnnnnnnnnnnnnnnnnnnnnnnnnnnnnnnnnnnnnnnnnnnnnnnnnnnnnnnnnnnnnnnnnnnnnnnnnnnnnnnnnnnnnnnnnnnnnnnnnnnnnnnnnnnnnnnnnnnnnnnnnnnnnnnnnnnnnnnnnnnnnnnnnnnnnnnnnnnnnnnnnnnnnnnnnnnnnnnnnnnnnnnnnnnnnnnnnnnnnnnnnnnnnnnnnnnnnnnnnnnnnnnnnnnnnnnnnnnnnnnnnnnnnnnnnnnnnnnnnnnnnnnnnnnnnnnnnnnnnnnnnnnnnnnnnnnnnnnnnnnnnnnnnnnnnnnnnnnnnnnnnnnnnnnnnnnnnnnnnnnnnnnnnnnnnnnnnnnnnnnnnnnnnnnnnnnnnnnnnnnnnnnnnnnnnnnnnnnnnnnnnnnnnnnnnnnnnnnnnnnnnnnnnnnnnnnnnnnnnnnnnnnnnnnnnnnnnnnnnnnnnnnnnnnnnnnnnnnnnnnnnnnnnnnnnnnnnnnnnnnnnnnnnnnnnnnnnnnnnnnnnnnnnnnnnnnnnnnnnnnnnnnnnnnnnnnnnnnnnnnnnnnnnnnnnnnnnnnnnnnnnnnnnnnnnnnnnnnnnnnnnnnnnnnnnnnnnnnnnnnnnnnnnnnnnnnnnnnnnnnnnnnnnnnnnnnnnnnnnnnnnnnnnnnnnnnnnnnnnnnnnnnnnnnnnnnnnnnnnnnnnnnnnnnnnnnnnnnnnnnnnnnnnnnnnnnnnnnnnnnnnnnnnnnnnnnnnnnnnnnnnnnnnnnnnnnnnnnnnnnnnnnnnnnnnnnnnnnnnnnnnnnnnnnnnnnnnnnnnnnnnnnnnnnnnnnnnnnnnnnnnnnnnnnnnnnnnnnnnnnnnnnnnnnnnnnnnnnnnnnnnnnnnnnnnnnnnnnnnnnnnnnnnnnnnnnnnnnnnnnnnnnnnnnnnnnnnnnnnnnnnnnnnnnnnnnnnnnnnnnnnnnnnnnnnnnnnnnnnnnnnnnnnnnnnnnnnnnnnnnnnnnnnnnnnnnnnnnnnnnnnnnnnnnnnnnnnnnnnnnnnnnnnnnnnnnnnnnnnnnnnnnnnnnnnnnnnnnnnnnnnnnnnnnnnnnnnnnnnnnnnnnnnnnnnnnnnnnnnnnnnnnnnnnnnnnnnnnnnnnnnnnnnnnnnnnnnnnnnnnnnnnnnnnnnnnnnnnnnnnnnnnnnnnnnnnnnnnnnnnnnnnnnnnnnnnnnnnnnnnnnnnnnnnnnnnnnnnnnnnnnnnnnnnnnnnnnnnnnnnnnnnnnnnnnnnnnnnnnnnnnnnnnnnnnnnnnnnnnnnnnnnnnnnnnnnnnnnnnnnnnnnnnnnnnnnnnnnnnnnnnnnnnnnnnnnnnnnnnnnnnnnnnnnnnnnnnnnnnnnnnnnnnnnnnnnnnnnnnnnnnnnnnnnnnnnnnnnnnnnnnnnnnnnnnnnnnnnnnnnnnnnnnnnnnnnnnnnnnnnnnnnnnnnnnnnnnnnnnnnnnnnnnnnnnnnnnnnnnnnnnnnnnnnnnnnnnnnnnnnnnnnnnnnnnnnnnnnnnnnnnnnnnnnnnnnnnnnnnnnnnnnnnnnnnnnnnnnnnnnnnnnnnnnnnnnnnnnnnnnnnnnnnnnnnnnnnnnnnnnnnnnnnnnnnnnnnnnnnnnnnnnnnnnnnnnnnnnnnnnnnnnnnnnnnnnnnnnnnnnnnnnnnnnnnnnnnnnnnnnnnnnnnnnnnnnnnnnnnnnnnnnnnnnnnnnnnnnnnnnnnnnnnnnnnnnnnnnnnnnnnnnnnnnnnnnnnnnnnnnnnnnnnnnnnnnnnnnnnnnnnnnnnnnnnnnnnnnnnnnnnnnnnnnnnnnnnnnnnnnnnnnnnnnnnnnnnnnnnnnnnnnnnnnnnnnnnnnnnnnnnnnnnnnnnnnnnnnnnnnnnnnnnnnnnnnnnnnnnnnnnnnnnnnnnnnnnnnnnnnnnnnnnnnnnnnnnnnnnnnnnnnnnnnnnnnnnnnnnnnnnnnnnnnnnnnnnnnnnnnnnnnnnnnnnnnnnnnnnnnnnnnnnnnnnnnnnnnnnnnnnnnnnnnnnnnnnnnnnnnnnnnnnnnnnnnnnnnnnnnnnnnnnnnnnnnnnnnnnnnnnnnnnnnnnnnnnnnnnnnnnnnnnnnnnnnnnnnnnnnnnnnnnnnnnnnnnnnnnnnnnnnnnnnnnnnnnnnnnnnnnnnnnnnnnnnnnnnnnnnnnnnnnnnnnnnnnnnnnnnnnnnnnnnnnnnnnnnnnnnnnnnnnnnnnnnnnnnnnnnnnnnnnnnnnnnnnnnnnnnnnnnnnnnnnnnnnnnnnnnnnnnnnnnnnnnnnnnnnnnnnnnnnnnnnnnnnnnnnnnnnnnnnnnnnnnnnnnnnnnnnnnnnnnnnnnnnnnnnnnnnnnnnnnnnnnnnnnnnnnnnnnnnnnnnnnnnnnnnnnnnnnnnnnnnnnnnnnnnnnnnnnnnnnnnnnnnnnnnnnnnnnnnnnnnnnnnnnnnnnnnnnnnnnnnnnnnnnnnnnnnnnnnnnnnnnnnnnnnnnnnnnnnnnnnnnnnnnnnnnnnnnnnnnnnnnnnnnnnnnnnnnnnnnnnnnnnnnnnnnnnnnnnnnnnnnnnnnnnnnnnnnnnnnnnnnnnnnnnnnnnnnnnnnnnnnnnnnnnnnnnnnnnnnnnnnnnnnnnnnnnnnnnnnnnnnnnnnnnnnnnnnnnnnnnnnnnnnnnnnnnnnnnnnnnnnnnnnnnnnnnnnnnnnnnnnnnnnnnnnnnnnnnnnnnnnnnnnnnnnnnnnnnnnnnnnnnnnnnnnnnnnnnnnnnnnnnnnnnnnnnnnnnnnnnnnnnnnnnnnnnnnnnnnnnnnnnnnnnnnnnnnnnnnnnnnnnnnnnnnnnnnnnnnnnnnnnnnnnnnnnnnnnnnnnnnnnnnnnnnnnnnnnnnnnnnnnnnnnnnnnnnnnnnnnnnnnnnnnnnnnnnnnnnnnnnnnnnnnnnnnnnnnnnnnnnnnnnnnnnnnnnnnnnnnnnnnnnnnnnnnnnnnnnnnnnnnnnnnnnnnnnnnnnnnnnnnnnnnnnnnnnnnnnnnnnnnnnnnnnnnnnnnnnnnnnnnnnnnnnnnnnnnnnnnnnnnnnnnnnnnnnnnnnnnnnnnnnnnnnnnnnnnnnnnnnnnnnnnnnnnnnnnnnnnnnnnnnnnnnnnnnnnnnnnnnnnnnnnnnnnnnnnnnnnnnnnnnnnnnnnnnnnnnnnnnnnnnnnnnnnnnnnnnnnnnnnnnnnnnnnnnnnnnnnnnnnnnnnnnnnnnnnnnnnnnnnnnnnnnnnnnnnnnnnnnnnnnnnnnnnnnnnnnnnnnnnnnnnnnnnnnnnnnnnnnnnnnnnnnnnnnnnnnnnnnnnnnnnnnnnnnnnnnnnnnnnnnnnnnnnnnnnnnnnnnnnnnnnnnnnnnnnnnnnnnnnnnnnnnnnnnnnnnnnnnnnnnnnnnnnnnnnnnnnnnnnnnnnnnnnnnnnnnnnnnnnnnnnnnnnnnnnnnnnnnnnnnnnnnnnnnnnnnnnnnnnnnnnnnnnnnnnnnnnnnnnnnnnnnnnnnnnnnnnnnnnnnnnnnnnnnnnnnnnnnnnnnnnnnnnnnnnnnnnnnnnnnnnnnnnnnnnnnnnnnnnnnnnnnnnnnnnnnnnnnnnnnnnnnnnnnnnnnnnnnnnnnnnnnnnnnnnnnnnnnnnnnnnnnnnnnnnnnnnnnnnnnnnnnnnnnnnnnnnnnnnnnnnnnnnnnnnnnnnnnnnnnnnnnnnnnnnnnnnnnnnnnnnnnnnnnnnnnnnnnnnnnnnnnnnnnnnnnnnnnnnnnnnnnnnnnnnnnnnnnnnnnnnnnnnnnnnnnnnnnnnnnnnnnnnnnnnnnnnnnnnnnnnnnnnnnnnnnnnnnnnnnnnnnnnnnnnnnnnnnnnnnnnnnnnnnnnnnnnnnnnnnnnnnnnnnnnnnnnnnnnnnnnnnnnnnnnnnnnnnnnnnnnnnnnnnnnnnnnnnnnnnnnnnnnnnnnnnnnnnnnnnnnnnnnnnnnnnnnnnnnnnnnnnnnnnnnnnnnnnnnnnnnnnnnnnnnnnnnnnnnnnnnnnnnnnnnnnnnnnnnnnnnnnnnnnnnnnnnnnnnnnnnnnnnnnnnnnnnnnnnnnnnnnnnnnnnnnnnnnnnnnnnnnnnnnnnnnnnnnnnnnnnnnnnnnnnnnnnnnnnnnnnnnnnnnnnnnnnnnnnnnnnnnnnnnnnnnnnnnnnnnnnnnnnnnnnnnnnnnnnnnnnnnnnnnnnnnnnnnnnnnnnnnnnnnnnnnnnnnnnnnnnnnnnnnnnnnnnnnnnnnnnnnnnnnnnnnnnnnnnnnnnnnnnnnnnnnnnnnnnnnnnnnnnnnnnnnnnnnnnnnnnnnnnnnnnnnnnnnnnnnnnnnnnnnnnnnnnnnnnnnnnnnnnnnnnnnnnnnnnnnnnnnnnnnnnnnnnnnnnnnnnnnnnnnnnnnnnnnnnnnnnnnnnnnnnnnnnnnnnnnnnnnnnnnnnnnnnnnnnnnnnnnnnnnnnnnnnnnnnnnnnnnnnnnnnnnnnnnnnnnnnnnnnnnnnnnnnnnnnnnnnnnnnnnnnnnnnnnnnnnnnnnnnnnnnnnnnnnnnnnnnnnnnnnnnnnnnnnnnnnnnnnnnnnnnnnnnnnnnnnnnnnnnnnnnnnnnnnnnnnnnnnnnnnnnnnnnnnnnnnnnnnnnnnnnnnnnnnnnnnnnnnnnnnnnnnnnnnnnnnnnnnnnnnnnnnnnnnnnnnnnnnnnnnnnnnnnnnnnnnnnnnnnnnnnnnnnnnnnnnnnnnnnnnnnnnnnnnnnnnnnnnnnnnnnnnnnnnnnnnnnnnnnnnnnnnnnnnnnnnnnnnnnnnnnnnnnnnnnnnnnnnnnnnnnnnnnnnnnnnnnnnnnnnnnnnnnnnnnnnnnnnnnnnnnnnnnnnnnnnnnnnnnnnnnnnnnnnnnnnnnnnnnnnnnnnnnnnnnnnnnnnnnnnnnnnnnnnnnnnnnnnnnnnnnnnnnnnnnnnnnnnnnnnnnnnnnnnnnnnnnnnnnnnnnnnnnnnnnnnnnnnnnnnnnnnnnnnnnnnnnnnnnnnnnnnnnnnnnnnnnnnnnnnnnnnnnnnnnnnnnnnnnnnnnnnnnnnnnnnnnnnnnnnnnnnnnnnnnnnnnnnnnnnnnnnnnnnnnnnnnnnnnnnnnnnnnnnnnnnnnnnnnnnnnnnnnnnnnnnnnnnnnnnnnnnnnnnnnnnnnnnnnnnnnnnnnnnnnnnnnnnnnnnnnnnnnnnnnnnnnnnnnnnnnnnnnnnnnnnnnnnnnnnnnnnnnnnnnnnnnnnnnnnnnnnnnnnnnnnnnnnnnnnnnnnnnnnnnnnnnnnnnnnnnnnnnnnnnnnnnnnnnnnnnnnnnnnnnnnnnnnnnnnnnnnnnnnnnnnnnnnnnnnnnnnnnnnnnnnnnnnnnnnnnnnnnnnnnnnnnnnnnnnnnnnnnnnnnnnnnnnnnnnnnnnnnnnnnnnnnnnnnnnnnnnnnnnnnnnnnnnnnnnnnnnnnnnnnnnnnnnnnnnnnnnnnnnnnnnnnnnnnnnnnnnnnnnnnnnnnnnnnnnnnnnnnnnnnnnnnnnnnnnnnnnnnnnnnnnnnnnnnnnnnnnnnnnnnnnnnnnnnnnnnnnnnnnnnnnnnnnnnnnnnnnnnnnnnnnnnnnnnnnnnnnnnnnnnnnnnnnnnnnnnnnnnnnnnnnnnnnnnnnnnnnnnnnnnnnnnnnnnnnnnnnnnnnnnnnnnnnnnnnnnnnnnnnnnnnnnnnnnnnnnnnnnnnnnnnnnnnnnnnnnnnnnnnnnnnnnnnnnnnnnnnnnnnnnnnnnnnnnnnnnnnnnnnnnnnnnnnnnnnnnnnnnnnnnnnnnnnnnnnnnnnnnnnnnnnnnnnnnnnnnnnnnnnnnnnnnnnnnnnnnnnnnnnnnnnnnnnnnnnnnnnnnnnnnnnnnnnnnnnnnnnnnnnnnnnnnnnnnnnnnnnnnnnnnnnnnnnnnnnnnnnnnnnnnnnnnnnnnnnnnnnnnnnnnnnnnnnnnnnnnnnnnnnnnnnnnnnnnnnnnnnnnnnnnnnnnnnnnnnnnnnnnnnnnnnnnnnnnnnnnnnnnnnnnnnnnnnnnnnnnnnnnnnnnnnnnnnnnnnnnnnnnnnnnnnnnnnnnnnnnnnnnnnnnnnnnnnnnnnnnnnnnnnnnnnnnnnnnnnnnnnnnnnnnnnnnnnnnnnnnnnnnnnnnnnnnnnnnnnnnnnnnnnnnnnnnnnnnnnnnnnnnnnnnnnnnnnnnnnnnnnnnnnnnnnnnnnnnnnnnnnnnnnnnnnnnnnnnnnnnnnnnnnnnnnnnnnnnnnnnnnnnnnnnnnnnnnnnnnnnnnnnnnnnnnnnnnnnnnnnnnnnnnnnnnnnnnnnnnnnnnnnnnnnnnnnnnnnnnnnnnnnnnnnnnnnnnnnnnnnnnnnnnnnnnnnnnnnnnnnnnnnnnnnnnnnnnnnnnnnnnnnnnnnnnnnnnnnnnnnnnnnnnnnnnnnnnnnnnnnnnnnnnnnnnnnnnnnnnnnnnnnnnnnnnnnnnnnnnnnnnnnnnnnnnnnnnnnnnnnnnnnnnnnnnnnnnnnnnnnnnnnnnnnnnnnnnnnnnnnnnnnnnnnnnnnnnnnnnnnnnnnnnnnnnnnnnnnnnnnnnnnnnnnnnnnnnnnnnnnnnnnnnnnnnnnnnnnnnnnnnnnnnnnnnnnnnnnnnnnnnnnnnnnnnnnnnnnnnnnnnnnnnnnnnnnnnnnnnnnnnnnnnnnnnnnnnnnnnnnnnnnnnnnnnnnnnnnnnnnnnnnnnnnnnnnnnnnnnnnnnnnnnnnnnnnnnnnnnnnnnnnnnnnnnnnnnnnnnnnnnnnnnnnnnnnnnnnnnnnnnnnnnnnnnnnnnnnnnnnnnnnnnnnnnnnnnnnnnnnnnnnnnnnnnnnnnnnnnnnnnnnnnnnnnnnnnnnnnnnnnnnnnnnnnnnnnnnnnnnnnnnnnnnnnnnnnnnnnnnnnnnnnnnnnnnnnnnnnnnnnnnnnnnnnnnnnnnnnnnnnnnnnnnnnnnnnnnnnnnnnnnnnnnnnnnnnnnnnnnnnnnnnnnnnnnnnnnnnnnnnnnnnnnnnnnnnnnnnnnnnnnnnnnnnnnnnnnnnnnnnnnnnnnnnnnnnnnnnnnnnnnnnnnnnnnnnnnnnnnnnnnnnnnnnnnnnnnnnnnnnnnnnnnnnnnnnnnnnnnnnnnnnnnnnnnnnnnnnnnnnnnnnnnnnnnnnnnnnnnnnnnnnnnnnnnnnnnnnnnnnnnnnnnnnnnnnnnnnnnnnnnnnnnnnnnnnnnnnnnnnnnnnnnnnnnnnnnnnnnnnnnnnnnnnnnnnnnnnnnnnnnnnnnnnnnnnnnnnnnnnnnnnnnnnnnnnnnnnnnnnnnnnnnnnnnnnnnnnnnnnnnnnnnnnnnnnnnnnnnnnnnnnnnnnnnnnnnnnnnnnnnnnnnnnnnnnnnnnnnnnnnnnnnnnnnnnnnnnnnnnnnnnnnnnnnnnnnnnnnnnnnnnnnnnnnnnnnnnnnnnnnnnnnnnnnnnnnnnnnnnnnnnnnnnnnnnnnnnnnnnnnnnnnnnnnnnnnnnnnnnnnnnnnnnnnnnnnnnnnnnnnnnnnnnnnnnnnnnnnnnnnnnnnnnnnnnnnnnnnnnnnnnnnnnnnnnnnnnnnnnnnnnnnnnnnnnnnnnnnnnnnnnnnnnnnnnnnnnnnnnnnnnnnnnnnnnnnnnnnnnnnnnnnnnnnnnnnnnnnnnnnnnnnnnnnnnnnnnnnnnnnnnnnnnnnnnnnnnnnnnnnnnnnnnnnnnnnnnnnnnnnnnnnnnnnnnnnnnnnnnnnnnnnnnnnnnnnnnnnnnnnnnnnnnnnnnnnnnnnnnnnnnnnnnnnnnnnnnnnnnnnnnnnnnnnnnnnnnnnnnnnnnnnnnnnnnnnnnnnnnnnnnnnnnnnnnnnnnnnnnnnnnnnnnnnnnnnnnnnnnnnnnnnnnnnnnnnnnnnnnnnnnnnnnnnnnnnnnnnnnnnnnnnnnnnnnnnnnnnnnnnnnnnnnnnnnnnnnnnnnnnnnnnnnnnnnnnnnnnnnnnnnnnnnnnnnnnnnnnnnnnnnnnnnnnnnnnnnnnnnnnnnnnnnnnnnnnnnnnnnnnnnnnnnnnnnnnnnnnnnnnnnnnnnnnnnnnnnnnnnnnnnnnnnnnnnnnnnnnnnnnnnnnnnnnnnnnnnnnnnnnnnnnnnnnnnnnnnnnnnnnnnnnnnnnnnnnnnnnnnnnnnnnnnnnnnnnnnnnnnnnnnnnnnnnnnnnnnnnnnnnnnnnnnnnnnnnnnnnnnnnnnnnnnnnnnnnnnnnnnnnnnnnnnnnnnnnnnnnnnnnnnnnnnnnnnnnnnnnnnnnnnnnnnnnnnnnnnnnnnnnnnnnnnnnnnnnnnnnnnnnnnnnnnnnnnnnnnnnnnnnnnnnnnnnnnnnnnnnnnnnnnnnnnnnnnnnnnnnnnnnnnnnnnnnnnnnnnnnnnnnnnnnnnnnnnnnnnnnnnnnnnnnnnnnnnnnnnnnnnnnnnnnnnnnnnnnnnnnnnnnnnnnnnnnnnnnnnnnnnnnnnnnnnnnnnnnnnnnnnnnnnnnnnnnnnnnnnnnnnnnnnnnnnnnnnnnnnnnnnnnnnnnnnnnnnnnnnnnnnnnnnnnnnnnnnnnnnnnnnnnnnnnnnnnnnnnnnnnnnnnnnnnnnnnnnnnnnnnnnnnnnnnnnnnnnnnnnnnnnnnnnnnnnnnnnnnnnnnnnnnnnnnnnnnnnnnnnnnnnnnnnnnnnnnnnnnnnnnnnnnnnnnnnnnnnnnnnnnnnnnnnnnnnnnnnnnnnnnnnnnnnnnnnnnnnnnnnnnnnnnnnnnnnnnnnnnnnnnnnnnnnnnnnnnnnnnnnnnnnnnnnnnnnnnnnnnnnnnnnnnnnnnnnnnnnnnnnnnnnnnnnnnnnnnnnnnnnnnnnnnnnnnnnnnnnnnnnnnnnnnnnnnnnnnnnnnnnnnnnnnnnnnnnnnnnnnnnnnnnnnnnnnnnnnnnnnnnnnnnnnnnnnnnnnnnnnnnnnnnnnnnnnnnnnnnnnnnnnnnnnnnnnnnnnnnnnnnnnnnnnnnnnnnnnnnnnnnnnnnnnnnnnnnnnnnnnnnnnnnnnnnnnnnnnnnnnnnnnnnnnnnnnnnnnnnnnnnnnnnnnnnnnnnnnnnnnnnnnnnnnnnnnnnnnnnnnnnnnnnnnnnnnnnnnnnnnnnnnnnnnnnnnnnnnnnnnnnnnnnnnnnnnnnnnnnnnnnnnnnnnnnnnnnnnnnnnnnnnnnnnnnnnnnnnnnnnnnnnnnnnnnnnnnnnnnnnnnnnnnnnnnnnnnnnnnnnnnnnnnnnnnnnnnnnnnnnnnnnnnnnnnnnnnnnnnnnnnnnnnnnnnnnnnnnnnnnnnnnnnnnnnnnnnnnnnnnnnnnnnnnnnnnnnnnnnnnnnnnnnnnnnnnnnnnnnnnnnnnnnnnnnnnnnnnnnnnnnnnnnnnnnnnnnnnnnnnnnnnnnnnnnnnnnnnnnnnnnnnnnnnnnnnnnnnnnnnnnnnnnnnnnnnnnnnnnnnnnnnnnnnnnnnnnnnnnnnnnnnnnnnnnnnnnnnnnnnnnnnnnnnnnnnnnnnnnnnnnnnnnnnnnnnnnnnnnnnnnnnnnnnnnnnnnnnnnnnnnnnnnnnnnnnnnnnnnnnnnnnnnnnnnnnnnnnnnnnnnnnnnnnnnnnnnnnnnnnnnnnnnnnnnnnnnnnnnnnnnnnnnnnnnnnnnnnnnnnnnnnnnnnnnnnnnnnnnnnnnnnnnnnnnnnnnnnnnnnnnnnnnnnnnnnnnnnnnnnnnnnnnnnnnnnnnnnnnnnnnnnnnnnnnnnnnnnnnnnnnnnnnnnnnnnnnnnnnnnnnnnnnnnnnnnnnnnnnnnnnnnnnnnnnnnnnnnnnnnnnnnnnnnnnnnnnnnnnnnnnnnnnnnnnnnnnnnnnnnnnnnnnnnnnnnnnnnnnnnnnnnnnnnnnnnnnnnnnnnnnnnnnnnnnnnnnnnnnnnnnnnnnnnnnnnnnnnnnnnnnnnnnnnnnnnnnnnnnnnnnnnnnnnnnnnnnnnnnnnnnnnnnnnnnnnnnnnnnnnnnnnnnnnnnnnnnnnnnnnnnnnnnnnnnnnnnnnnnnnnnnnnnnnnnnnnnnnnnnnnnnnnnnnnnnnnnnnnnnnnnnnnnnnnnnnnnnnnnnnnnnnnnnnnnnnnnnnnnnnnnnnnnnnnnnnnnnnnnnnnnnnnnnnnnnnnnnnnnnnnnnnnnnnnnnnnnnnnnnnnnnnnnnnnnnnnnnnnnnnnnnnnnnnnnnnnnnnnnnnnnnnnnnnnnnnnnnnnnnnnnnnnnnnnnnnnnnnnnnnnnnnnnnnnnnnnnnnnnnnnnnnnnnnnnnnnnnnnnnnnnnnnnnnnnnnnnnnnnnnnnnnnnnnnnnnnnnnnnnnnnnnnnnnnnnnnnnnnnnnnnnnnnnnnnnnnnnnnnnnnnnnnnnnnnnnnnnnnnnnnnnnnnnnnnnnnnnnnnnnnnnnnnnnnnnnnnnnnnnnnnnnnnnnnnnnnnnnnnnnnnnnnnnnnnnnnnnnnnnnnnnnnnnnnnnnnnnnnnnnnnnnnnnnnnnnnnnnnnnnnnnnnnnnnnnnnnnnnnnnnnnnnnnnnnnnnnnnnnnnnnnnnnnnnnnnnnnnnnnnnnnnnnnnnnnnnnnnnnnnnnnnnnnnnnnnnnnnnnnnnnnnnnnnnnnnnnnnnnnnnnnnnnnnnnnnnnnnnnnnnnnnnnnnnnnnnnnnnnnnnnnnnnnnnnnnnnnnnnnnnnnnnnnnnnnnnnnnnnnnnnnnnnnnnnnnnnnnnnnnnnnnnnnnnnnnnnnnnnnnnnnnnnnnnnnnnnnnnnnnnnnnnnnnnnnnnnnnnnnnnnnnnnnnnnnnnnnnnnnnnnnnnnnnnnnnnnnnnnnnnnnnnnnnnnnnnnnnnnnnnnnnnnnnnnnnnnnnnnnnnnnnnnnnnnnnnnnnnnnnnnnnnnnnnnnnnnnnnnnnnnnnnnnnnnnnnnnnnnnnnnnnnnnnnnnnnnnnnnnnnnnnnnnnnnnnnnnnnnnnnnnnnnnnnnnnnnnnnnnnnnnnnnnnnnnnnnnnnnnnnnnnnnnnnnnnnnnnnnnnnnnnnnnnnnnnnnnnnnnnnnnnnnnnnnnnnnnnnnnnnnnnnnnnnnnnnnnnnnnnnnnnnnnnnnnnnnnnnnnnnnnnnnnnnnnnnnnnnnnnnnnnnnnnnnnnnnnnnnnnnnnnnnnnnnnnnnnnnnnnnnnnnnnnnnnnnnnnnnnnnnnnnnnnnnnnnnnnnnnnnnnnnnnnnnnnnnnnnnnnnnnnnnnnnnnnnnnnnnnnnnnnnnnnnnnnnnnnnnnnnnnnnnnnnnnnnnnnnnnnnnnnnnnnnnnnnnnnnnnnnnnnnnnnnnnnnnnnnnnnnnnnnnnnnnnnnnnnnnnnnnnnnnnnnnnnnnnnnnnnnnnnnnnnnnnnnnnnnnnnnnnnnnnnnnnnnnnnnnnnnnnnnnnnnnnnnnnnnnnnnnnnnnnnnnnnnnnnnnnnnnnnnnnnnnnnnnnnnnnnnnnnnnnnnnnnnnnnnnnnnnnnnnnnnnnnnnnnnnnnnnnnnnnnnnnnnnnnnnnnnnnnnnnnnnnnnnnnnnnnnnnnnnnnnnnnnnnnnnnnnnnnnnnnnnnnnnnnnnnnnnnnnnnnnnnnnnnnnnnnnnnnnnnnnnnnnnnnnnnnnnnnnnnnnnnnnnnnnnnnnnnnnnnnnnnnnnnnnnnnnnnnnnnnnnnnnnnnnnnnnnnnnnnnnnnnnnnnnnnnnnnnnnnnnnnnnnnnnnnnnnnnnnnnnnnnnnnnnnnnnnnnnnnnnnnnnnnnnnnnnnnnnnnnnnnnnnnnnnnnnnnnnnnnnnnnnnnnnnnnnnnnnnnnnnnnnnnnnnnnnnnnnnnnnnnnnnnnnnnnnnnnnnnnnnnnnnnnnnnnnnnnnnnnnnnnnnnnnnnnnnnnnnnnnnnnnnnnnnnnnnnnnnnnnnnnnnnnnnnnnnnnnnnnnnnnnnnnnnnnnnnnnnnnnnnnnnnnnnnnnnnnnnnnnnnnnnnnnnnnnnnnnnnnnnnnnnnnnnnnnnnnnnnnnnnnnnnnnnnnnnnnnnnnnnnnnnnnnnnnnnnnnnnnnnnnnnnnnnnnnnnnnnnnnnnnnnnnnnnnnnnnnnnnnnnnnnnnnnnnnnnnnnnnnnnnnnnnnnnnnnnnnnnnnnnnnnnnnnnnnnnnnnnnnnnnnnnnnnnnnnnnnnnnnnnnnnnnnnnnnnnnnnnnnnnnnnnnnnnnnnnnnnnnnnnnnnnnnnnnnnnnnnnnnnnnnnnnnnnnnnnnnnnnnnnnnnnnnnnnnnnnnnnnnnnnnnnnnnnnnnnnnnnnnnnnnnnnnnnnnnnnnnnnnnnnnnnnnnnnnnnnnnnnnnnnnnnnnnnnnnnnnnnnnnnnnnnnnnnnnnnnnnnnnnnnnnnnnnnnnnnnnnnnnnnnnnnnnnnnnnnnnnnnnnnnnnnnnnnnnnnnnnnnnnnnnnnnnnnnnnnnnnnnnnnnnnnnnnnnnnnnnnnnnnnnnnnnnnnnnnnnnnnnnnnnnnnnnnnnnnnnnnnnnnnnnnnnnnnnnnnnnnnnnnnnnnnnnnnnnnnnnnnnnnnnnnnnnnnnnnnnnnnnnnnnnnnnnnnnnnnnnnnnnnnnnnnnnnnnnnnnnnnnnnnnnnnnnnnnnnnnnnnnnnnnnnnnnnnnnnnnnnnnnnnnnnnnnnnnnnnnnnnnnnnnnnnnnnnnnnnnnnnnnnnnnnnnnnnnnnnnnnnnnnnnnnnnnnnnnnnnnnnnnnnnnnnnnnnnnnnnnnnnnnnnnnnnnnnnnnnnnnnnnnnnnnnnnnnnnnnnnnnnnnnnnnnnnnnnnnnnnnnnnnnnnnnnnnnnnnnnnnnnnnnnnnnnnnnnnnnnnnnnnnnnnnnnnnnnnnnnnnnnnnnnnnnnnnnnnnnnnnnnnnnnnnnnnnnnnnnnnnnnnnnnnnnnnnnnnnnnnnnnnnnnnnnnnnnnnnnnnnnnnnnnnnnnnnnnnnnnnnnnnnnnnnnnnnnnnnnnnnnnnnnnnnnnnnnnnnnnnnnnnnnnnnnnnnnnnnnnnnnnnnnnnnnnnnnnnnnnnnnnnnnnnnnnnnnnnnnnnnnnnnnnnnnnnnnnnnnnnnnnnnnnnnnnnnnnnnnnnnnnnnnnnnnnnnnnnnnnnnnnnnnnnnnnnnnnnnnnnnnnnnnnnnnnnnnnnnnnnnnnnnnnnnnnnnnnnnnnnnnnnnnnnnnnnnnnnnnnnnnnnnnnnnnnnnnnnnnnnnnnnnnnnnnnnnnnnnnnnnnnnnnnnnnnnnnnnnnnnnnnnnnnnnnnnnnnnnnnnnnnnnnnnnnnnnnnnnnnnnnnnnnnnnnnnnnnnnnnnnnnnnnnnnnnnnnnnnnnnnnnnnnnnnnnnnnnnnnnnnnnnnnnnnnnnnnnnnnnnnnnnnnnnnnnnnnnnnnnnnnnnnnnnnnnnnnnnnnnnnnnnnnnnnnnnnnnnnnnnnnnnnnnnnnnnnnnnnnnnnnnnnnnnnnnnnnnnnnnnnnnnnnnnnnnnnnnnnnnnnnnnnnnnnnnnnnnnnnnnnnnnnnnnnnnnnnnnnnnnnnnnnnnnnnnnnnnnnnnnnnnnnnnnnnnnnnnnnnnnnnnnnnnnnnnnnnnnnnnnnnnnnnnnnnnnnnnnnnnnnnnnnnnnnnnnnnnnnnnnnnnnnnnnnnnnnnnnnnnnnnnnnnnnnnnnnnnnnnnnnnnnnnnnnnnnnnnnnnnnnnnnnnnnnnnnnnnnnnnnnnnnnnnnnnnnnnnnnnnnnnnnnnnnnnnnnnnnnnnnnnnnnnnnnnnnnnnnnnnnnnnnnnnnnnnnnnnnnnnnnnnnnnnnnnnnnnnnnnnnnnnnnnnnnnnnnnnnnnnnnnnnnnnnnnnnnnnnnnnnnnnnnnnnnnnnnnnnnnnnnnnnnnnnnnnnnnnnnnnnnnnnnnnnnnnnnnnnnnnnnnnnnnnnnnnnnnnnnnnnnnnnnnnnnnnnnnnnnnnnnnnnnnnnnnnnnnnnnnnnnnnnnnnnnnnnnnnnnnnnnnnnnnnnnnnnnnnnnnnnnnnnnnnnnnnnnnnnnnnnnnnnnnnnnnnnnnnnnnnnnnnnnnnnnnnnnnnnnnnnnnnnnnnnnnnnnnnnnnnnnnnnnnnnnnnnnnnnnnnnnnnnnnnnnnnnnnnnnnnnnnnnnnnnnnnnnnnnnnnnnnnnnnnnnnnnnnnnnnnnnnnnnnnnnnnnnnnnnnnnnnnnnnnnnnnnnnnnnnnnnnnnnnnnnnnnnnnnnnnnnnnnnnnnnnnnnnnnnnnnnnnnnnnnnnnnnnnnnnnnnnnnnnnnnnnnnnnnnnnnnnnnnnnnnnnnnnnnnnnnnnnnnnnnnnnnnnnnnnnnnnnnnnnnnnnnnnnnnnnnnnnnnnnnnnnnnnnnnnnnnnnnnnnnnnnnnnnnnnnnnnnnnnnnnnnnnnnnnnnnnnnnnnnnnnnnnnnnnnnnnnnnnnnnnnnnnnnnnnnnnnnnnnnnnnnnnnnnnnnnnnnnnnnnnnnnnnnnnnnnnnnnnnnnnnnnnnnnnnnnnnnnnnnnnnnnnnnnnnnnnnnnnnnnnnnnnnnnnnnnnnnnnnnnnnnnnnnnnnnnnnnnnnnnnnnnnnnnnnnnnnnnnnnnnnnnnnnnnnnnnnnnnnnnnnnnnnnnnnnnnnnnnnnnnnnnnnnnnnnnnnnnnnnnnnnnnnnnnnnnnnnnnnnnnnnnnnnnnnnnnnnnnnnnnnnnnnnnnnnnnnnnnnnnnnnnnnnnnnnnnnnnnnnnnnnnnnnnnnnnnnnnnnnnnnnnnnnnnnnnnnnnnnnnnnnnnnnnnnnnnnnnnnnnnnnnnnnnnnnnnnnnnnnnnnnnnnnnnnnnnnnnnnnnnnnnnnnnnnnnnnnnnnnnnnnnnnnnnnnnnnnnnnnnnnnnnnnnnnnnnnnnnnnnnnnnnnnnnnnnnnnnnnnnnnnnnnnnnnnnnnnnnnnnnnnnnnnnnnnnnnnnnnnnnnnnnnnnnnnnnnnnnnnnnnnnnnnnnnnnnnnnnnnnnnnnnnnnnnnnnnnnnnnnnnnnnnnnnnnnnnnnnnnnnnnnnnnnnnnnnnnnnnnnnnnnnnnnnnnnnnnnnnnnnnnnnnnnnnnnnnnnnnnnnnnnnnnnnnnnnnnnnnnnnnnnnnnnnnnnnnnnnnnnnnnnnnnnnnnnnnnnnnnnnnnnnnnnnnnnnnnnnnnnnnnnnnnnnnnnnnnnnnnnnnnnnnnnnnnnnnnnnnnnnnnnnnnnnnnnnnnnnnnnnnnnnnnnnnnnnnnnnnnnnnnnnnnnnnnnnnnnnnnnnnnnnnnnnnnnnnnnnnnnnnnnnnnnnnnnnnnnnnnnnnnnnnnnnnnnnnnnnnnnnnnnnnnnnnnnnnnnnnnnnnnnnnnnnnnnnnnnnnnnnnnnnnnnnnnnnnnnnnnnnnnnnnnnnnnnnnnnnnnnnnnnnnnnnnnnnnnnnnnnnnnnnnnnnnnnnnnnnnnnnnnnnnnnnnnnnnnnnnnnnnnnnnnnnnnnnnnnnnnnnnnnnnnnnnnnnnnnnnnnnnnnnnnnnnnnnnnnnnnnnnnnnnnnnnnnnnnnnnnnnnnnnnnnnnnnnnnnnnnnnnnnnnnnnnnnnnnnnnnnnnnnnnnnnnnnnnnnnnnnnnnnnnnnnnnnnnnnnnnnnnnnnnnnnnnnnnnnnnnnnnnnnnnnnnnnnnnnnnnnnnnnnnnnnnnnnnnnnnnnnnnnnnnnnnnnnnnnnnnnnnnnnnnnnnnnnnnnnnnnnnnnnnnnnnnnnnnnnnnnnnnnnnnnnnnnnnnnnnnnnnnnnnnnnnnnnnnnnnnnnnnnnnnnnnnnnnnnnnnnnnnnnnnnnnnnnnnnnnnnnnnnnnnnnnnnnnnnnnnnnnnnnnnnnnnnnnnnnnnnnnnnnnnnnnnnnnnnnnnnnnnnnnnnnnnnnnnnnnnnnnnnnnnnnnnnnnnnnnnnnnnnnnnnnnnnnnnnnnnnnnnnnnnnnnnnnnnnnnnnnnnnnnnnnnnnnnnnnnnnnnnnnnnnnnnnnnnnnnnnnnnnnnnnnnnnnnnnnnnnnnnnnnnnnnnnnnnnnnnnnnnnnnnnnnnnnnnnnnnnnnnnnnnnnnnnnnnnnnnnnnnnnnnnnnnnnnnnnnnnnnnnnnnnnnnnnnnnnnnnnnnnnnnnnnnnnnnnnnnnnnnnnnnnnnnnnnnnnnnnnnnnnnnnnnnnnnnnnnnnnnnnnnnnnnnnnnnnnnnnnnnnnnnnnnnnnnnnnnnnnnnnnnnnnnnnnnnnnnnnnnnnnnnnnnnnnnnnnnnnnnnnnnnnnnnnnnnnnnnnnnnnnnnnnnnnnnnnnnnnnnnnnnnnnnnnnnnnnnnnnnnnnnnnnnnnnnnnnnnnnnnnnnnnnnnnnnnnnnnnnnnnnnnnnnnnnnnnnnnnnnnnnnnnnnnnnnnnnnnnnnnnnnnnnnnnnnnnnnnnnnnnnnnnnnnnnnnnnnnnnnnnnnnnnnnnnnnnnnnnnnnnnnnnnnnnnnnnnnnnnnnnnnnnnnnnnnnnnnnnnnnnnnnnnnnnnnnnnnnnnnnnnnnnnnnnnnnnnnnnnnnnnnnnnnnnnnnnnnnnnnnnnnnnnnnnnnnnnnnnnnnnnnnnnnnnnnnnnnnnnnnnnnnnnnnnnnnnnnnnnnnnnnnnnnnnnnnnnnnnnnnnnnnnnnnnnnnnnnnnnnnnnnnnnnnnnnnnnnnnnnnnnnnnnnnnnnnnnnnnnnnnnnnnnnnnnnnnnnnnnnnnnnnnnnnnnnnnnnnnnnnnnnnnnnnnnnnnnnnnnnnnnnnnnnnnnnnnnnnnnnnnnnnnnnnnnnnnnnnnnnnnnnnnnnnnnnnnnnnnnnnnnnnnnnnnnnnnnnnnnnnnnnnnnnnnnnnnnnnnnnnnnnnnnnnnnnnnnnnnnnnnnnnnnnnnnnnnnnnnnnnnnnnnnnnnnnnnnnnnnnnnnnnnnnnnnnnnnnnnnnnnnnnnnnnnnnnnnnnnnnnnnnnnnnnnnnnnnnnnnnnnnnnnnnnnnnnnnnnnnnnnnnnnnnnnnnnnnnnnnnnnnnnnnnnnnnnnnnnnnnnnnnnnnnnnnnnnnnnnnnnnnnnnnnnnnnnnnnnnnnnnnnnnnnnnnnnnnnnnnnnnnnnnnnnnnnnnnnnnnnnnnnnnnnnnnnnnnnnnnnnnnnnnnnnnnnnnnnnnnnnnnnnnnnnnnnnnnnnnnnnnnnnnnnnnnnnnnnnnnnnnnnnnnnnnnnnnnnnnnnnnnnnnnnnnnnnnnnnnnnnnnnnnnnnnnnnnnnnnnnnnnnnnnnnnnnnnnnnnnnnnnnnnnnnnnnnnnnnnnnnnnnnnnnnnnnnnnnnnnnnnnnnnnnnnnnnnnnnnnnnnnnnnnnnnnnnnnnnnnnnnnnnnnnnnnnnnnnnnnnnnnnnnnnnnnnnnnnnnnnnnnnnnnnnnnnnnnnnnnnnnnnnnnnnnnnnnnnnnnnnnnnnnnnnnnnnnnnnnnnnnnnnnnnnnnnnnnnnnnnnnnnnnnnnnnnnnnnnnnnnnnnnnnnnnnnnnnnnnnnnnnnnnnnnnnnnnnnnnnnnnnnnnnnnnnnnnnnnnnnnnnnnnnnnnnnnnnnnnnnnnnnnnnnnnnnnnnnnnnnnnnnnnnnnnnnnnnnnnnnnnnnnnnnnnnnnnnnnnnnnnnnnnnnnnnnnnnnnnnnnnnnnnnnnnnnnnnnnnnnnnnnnnnnnnnnnnnnnnnnnnnnnnnnnnnnnnnnnnnnnnnnnnnnnnnnnnnnnnnnnnnnnnnnnnnnnnnnnnnnnnnnnnnnnnnnnnnnnnnnnnnnnnnnnnnnnnnnnnnnnnnnnnnnnnnnnnnnnnnnnnnnnnnnnnnnnnnnnnnnnnnnnnnnnnnnnnnnnnnnnnnnnnnnnnnnnnnnnnnnnnnnnnnnnnnnnnnnnnnnnnnnnnnnnnnnnnnnnnnnnnnnnnnnnnnnnnnnnnnnnnnnnnnnnnnnnnnnnnnnnnnnnnnnnnnnnnnnnnnnnnnnnnnnnnnnnnnnnnnnnnnnnnnnnnnnnnnnnnnnnnnnnnnnnnnnnnnnnnnnnnnnnnnnnnnnnnnnnnnnnnnnnnnnnnnnnnnnnnnnnnnnnnnnnnnnnnnnnnnnnnnnnnnnnnnnnnnnnnnnnnnnnnnnnnnnnnnnnnnnnnnnnnnnnnnnnnnnnnnnnnnnnnnnnnnnnnnnnnnnnnnnnnnnnnnnnnnnnnnnnnnnnnnnnnnnnnnnnnnnnnnnnnnnnnnnnnnnnnnnnnnnnnnnnnnnnnnnnnnnnnnnnnnnnnnnnnnnnnnnnnnnnnnnnnnnnnnnnnnnnnnnnnnnnnnnnnnnnnnnnnnnnnnnnnnnnnnnnnnnnnnnnnnnnnnnnnnnnnnnnnnnnnnnnnnnnnnnnnnnnnnnnnnnnnnnnnnnnnnnnnnnnnnnnnnnnnnnnnnnnnnnnnnnnnnnnnnnnnnnnnnnnnnnnnnnnnnnnnnnnnnnnnnnnnnnnnnnnnnnnnnnnnnnnnnnnnnnnnnnnnnnnnnnnnnnnnnnnnnnnnnnnnnnnnnnnnnnnnnnnnnnnnnnnnnnnnnnnnnnnnnnnnnnnnnnnnnnnnnnnnnnnnnnnnnnnnnnnnnnnnnnnnnnnnnnnnnnnnnnnnnnnnnnnnnnnnnnnnnnnnnnnnnnnnnnnnnnnnnnnnnnnnnnnnnnnnnnnnnnnnnnnnnnnnnnnnnnnnnnnnnnnnnnnnnnnnnnnnnnnnnnnnnnnnnnnnnnnnnnnnnnnnnnnnnnnnnnnnnnnnnnnnnnnnnnnnnnnnnnnnnnnnnnnnnnnnnnnnnnnnnnnnnnnnnnnnnnnnnnnnnnnnnnnnnnnnnnnnnnnnnnnnnnnnnnnnnnnnnnnnnnnnnnnnnnnnnnnnnnnnnnnnnnnnnnnnnnnnnnnnnnnnnnnnnnnnnnnnnnnnnnnnnnnnnnnnnnnnnnnnnnnnnnnnnnnnnnnnnnnnnnnnnnnnnnnnnnnnnnnnnnnnnnnnnnnnnnnnnnnnnnnnnnnnnnnnnnnnnnnnnnnnnnnnnnnnnnnnnnnnnnnnnnnnnnnnnnnnnnnnnnnnnnnnnnnnnnnnnnnnnnnnnnnnnnnnnnnnnnnnnnnnnnnnnnnnnnnnnnnnnnnnnnnnnnnnnnnnnnnnnnnnnnnnnnnnnnnnnnnnnnnnnnnnnnnnnnnnnnnnnnnnnnnnnnnnnnnnnnnnnnnnnnnnnnnnnnnnnnnnnnnnnnnnnnnnnnnnnnnnnnnnnnnnnnnnnnnnnnnnnnnnnnnnnnnnnnnnnnnnnnnnnnnnnnnnnnnnnnnnnnnnnnnnnnnnnnnnnnnnnnnnnnnnnnnnnnnnnnnnnnnnnnnnnnnnnnnnnnnnnnnnnnnnnnnnnnnnnnnnnnnnnnnnnnnnnnnnnnnnnnnnnnnnnnnnnnnnnnnnnnnnnnnnnnnnnnnnnnnnnnnnnnnnnnnnnnnnnnnnnnnnnnnnnnnnnnnnnnnnnnnnnnnnnnnnnnnnnnnnnnnnnnnnnnnnnnnnnnnnnnnnnnnnnnnnnnnnnnnnnnnnnnnnnnnnnnnnnnnnnnnnnnnnnnnnnnnnnnnnnnnnnnnnnnnnnnnnnnnnnnnnnnnnnnnnnnnnnnnnnnnnnnnnnnnnnnnnnnnnnnnnnnnnnnnnnnnnnnnnnnnnnnnnnnnnnnnnnnnnnnnnnnnnnnnnnnnnnnnnnnnnnnnnnnnnnnnnnnnnnnnnnnnnnnnnnnnnnnnnnnnnnnnnnnnnnnnnnnnnnnnnnnnnnnnnnnnnnnnnnnnnnnnnnnnnnnnnnnnnnnnnnnnnnnnnnnnnnnnnnnnnnnnnnnnnnnnnnnnnnnnnnnnnnnnnnnnnnnnnnnnnnnnnnnnnnnnnnnnnnnnnnnnnnnnnnnnnnnnnnnnnnnnnnnnnnnnnnnnnnnnnnnnnnnnnnnnnnnnnnnnnnnnnnnnnnnnnnnnnnnnnnnnnnnnnnnnnnnnnnnnnnnnnnnnnnnnnnnnnnnnnnnnnnnnnnnnnnnnnnnnnnnnnnnnnnnnnnnnnnnnnnnnnnnnnnnnnnnnnnnnnnnnnnnnnnnnnnnnnnnnnnnnnnnnnnnnnnnnnnnnnnnnnnnnnnnnnnnnnnnnnnnnnnnnnnnnnnnnnnnnnnnnnnnnnnnnnnnnnnnnnnnnnnnnnnnnnnnnnnnnnnnnnnnnnnnnnnnnnnnnnnnnnnnnnnnnnnnnnnnnnnnnnnnnnnnnnnnnnnnnnnnnnnnnnnnnnnnnnnnnnnnnnnnnnnnnnnnnnnnnnnnnnnnnnnnnnnnnnnnnnnnnnnnnnnnnnnnnnnnnnnnnnnnnnnnnnnnnnnnnnnnnnnnnnnnnnnnnnnnnnnnnnnnnnnnnnnnnnnnnnnnnnnnnnnnnnnnnnnnnnnnnnnnnnnnnnnnnnnnnnnnnnnnnnnnnnnnnnnnnnnnnnnnnnnnnnnnnnnnnnnnnnnnnnnnnnnnnnnnnnnnnnnnnnnnnnnnnnnnnnnnnnnnnnnnnnnnnnnnnnnnnnnnnnnnnnnnnnnnnnnnnnnnnnnnnnnnnnnnnnnnnnnnnnnnnnnnnnnnnnnnnnnnnnnnnnnnnnnnnnnnnnnnnnnnnnnnnnnnnnnnnnnnnnnnnnnnnnnnnnnnnnnnnnnnnnnnnnnnnnnnnnnnnnnnnnnnnnnnnnnnnnnnnnnnnnnnnnnnnnnnnnnnnnnnnnnnnnnnnnnnnnnnnnnnnnnnnnnnnnnnnnnnnnnnnnnnnnnnnnnnnnnnnnnnnnnnnnnnnnnnnnnnnnnnnnnnnnnnnnnnnnnnnnnnnnnnnnnnnnnnnnnnnnnnnnnnnnnnnnnnnnnnnnnnnnnnnnnnnnnnnnnnnnnnnnnnnnnnnnnnnnnnnnnnnnnnnnnnnnnnnnnnnnnnnnnnnnnnnnnnnnnnnnnnnnnnnnnnnnnnnnnnnnnnnnnnnnnnnnnnnnnnnnnnnnnnnnnnnnnnnnnnnnnnnnnnnnnnnnnnnnnnnnnnnnnnnnnnnnnnnnnnnnnnnnnnnnnnnnnnnnnnnnnnnnnnnnnnnnnnnnnnnnnnnnnnnnnnnnnnnnnnnnnnnnnnnnnnnnnnnnnnnnnnnnnnnnnnnnnnnnnnnnnnnnnnnnnnnnnnnnnnnnnnnnnnnnnnnnnnnnnnnnnnnnnnnnnnnnnnnnnnnnnnnnnnnnnnnnnnnnnnnnnnnnnnnnnnnnnnnnnnnnnnnnnnnnnnnnnnnnnnnnnnnnnnnnnnnnnnnnnnnnnnnnnnnnnnnnnnnnnnnnnnnnnnnnnnnnnnnnnnnnnnnnnnnnnnnnnnnnnnnnnnnnnnnnnnnnnnnnnnnnnnnnnnnnnnnnnnnnnnnnnnnnnnnnnnnnnnnnnnnnnnnnnnnnnnnnnnnnnnnnnnnnnnnnnnnnnnnnnnnnnnnnnnnnnnnnnnnnnnnnnnnnnnnnnnnnnnnnnnnnnnnnnnnnnnnnnnnnnnnnnnnnnnnnnnnnnnnnnnnnnnnnnnnnnnnnnnnnnnnnnnnnnnnnnnnnnnnnnnnnnnnnnnnnnnnnnnnnnnnnnnnnnnnnnnnnnnnnnnnnnnnnnnnnnnnnnnnnnnnnnnnnnnnnnnnnnnnnnnnnnnnnnnnnnnnnnnnnnnnnnnnnnnnnnnnnnnnnnnnnnnnnnnnnnnnnnnnnnnnnnnnnnnnnnnnnnnnnnnnnnnnnnnnnnnnnnnnnnnnnnnnnnnnnnnnnnnnnnnnnnnnnnnnnnnnnnnnnnnnnnnnnnnnnnnnnnnnnnnnnnnnnnnnnnnnnnnnnnnnnnnnnnnnnnnnnnnnnnnnnnnnnnnnnnnnnnnnnnnnnnnnnnnnnnnnnnnnnnnnnnnnnnnnnnnnnnnnnnnnnnnnnnnnnnnnnnnnnnnnnnnnnnnnnnnnnnnnnnnnnnnnnnnnnnnnnnnnnnnnnnnnnnnnnnnnnnnnnnnnnnnnnnnnnnnnnnnnnnnnnnnnnnnnnnnnnnnnnnnnnnnnnnnnnnnnnnnnnnnnnnnnnnnnnnnnnnnnnnnnnnnnnnnnnnnnnnnnnnnnnnnnnnnnnnnnnnnnnnnnnnnnnnnnnnnnnnnnnnnnnnnnnnnnnnnnnnnnnnnnnnnnnnnnnnnnnnnnnnnnnnnnnnnnnnnnnnnnnnnnnnnnnnnnnnnnnnnnnnnnnnnnnnnnnnnnnnnnnnnnnnnnnnnnnnnnnnnnnnnnnnnnnnnnnnnnnnnnnnnnnnnnnnnnnnnnnnnnnnnnnnnnnnnnnnnnnnnnnnnnnnnnnnnnnnnnnnnnnnnnnnnnnnnnnnnnnnnnnnnnnnnnnnnnnnnnnnnnnnnnnnnnnnnnnnnnnnnnnnnnnnnnnnnnnnnnnnnnnnnnnnnnnnnnnnnnnnnnnnnnnnnnnnnnnnnnnnnnnnnnnnnnnnnnnnnnnnnnnnnnnnnnnnnnnnnnnnnnnnnnnnnnnnnnnnnnnnnnnnnnnnnnnnnnnnnnnnnnnnnnnnnnnnnnnnnnnnnnnnnnnnnnnnnnnnnnnnnnnnnnnnnnnnnnnnnnnnnnnnnnnnnnnnnnnnnnnnnnnnnnnnnnnnnnnnnnnnnnnnnnnnnnnnnnnnnnnnnnnnnnnnnnnnnnnnnnnnnnnnnnnnnnnnnnnnnnnnnnnnnnnnnnnnnnnnnnnnnnnnnnnnnnnnnnnnnnnnnnnnnnnnnnnnnnnnnnnnnnnnnnnnnnnnnnnnnnnnnnnnnnnnnnnnnnnnnnnnnnnnnnnnnnnnnnnnnnnnnnnnnnnnnnnnnnnnnnnnnnnnnnnnnnnnnnnnnnnnnnnnnnnnnnnnnnnnnnnnnnnnnnnnnnnnnnnnnnnnnnnnnnnnnnnnnnnnnnnnnnnnnnnnnnnnnnnnnnnnnnnnnnnnnnnnnnnnnnnnnnnnnnnnnnnnnnnnnnnnnnnnnnnnnnnnnnnnnnnnnnnnnnnnnnnnnnnnnnnnnnnnnnnnnnnnnnnnnnnnnnnnnnnnnnnnnnnnnnnnnnnnnnnnnnnnnnnnnnnnnnnnnnnnnnnnnnnnnnnnnnnnnnnnnnnnnnnnnnnnnnnnnnnnnnnnnnnnnnnnnnnnnnnnnnnnnnnnnnnnnnnnnnnnnnnnnnnnnnnnnnnnnnnnnnnnnnnnnnnnnnnnnnnnnnnnnnnnnnnnnnnnnnnnnnnnnnnnnnnnnnnnnnnnnnnnnnnnnnnnnnnnnnnnnnnnnnnnnnnnnnnnnnnnnnnnnnnnnnnnnnnnnnnnnnnnnnnnnnnnnnnnnnnnnnnnnnnnnnnnnnnnnnnnnnnnnnnnnnnnnnnnnnnnnnnnnnnnnnnnnnnnnnnnnnnnnnnnnnnnnnnnnnnnnnnnnnnnnnnnnnnnnnnnnnnnnnnnnnnnnnnnnnnnnnnnnnnnnnnnnnnnnnnnnnnnnnnnnnnnnnnnnnnnnnnnnnnnnnnnnnnnnnnnnnnnnnnnnnnnnnnnnnnnnnnnnnnnnnnnnnnnnnnnnnnnnnnnnnnnnnnnnnnnnnnnnnnnnnnnnnnnnnnnnnnnnnnnnnnnnnnnnnnnnnnnnnnnnnnnnnnnnnnnnnnnnnnnnnnnnnnnnnnnnnnnnnnnnnnnnnnnnnnnnnnnnnnnnnnnnnnnnnnnnnnnnnnnnnnnnnnnnnnnnnnnnnnnnnnnnnnnnnnnnnnnnnnnnnnnnnnnnnnnnnnnnnnnnnnnnnnnnnnnnnnnnnnnnnnnnnnnnnnnnnnnnnnnnnnnnnnnnnnnnnnnnnnnnnnnnnnnnnnnnnnnnnnnnnnnnnnnnnnnnnnnnnnnnnnnnnnnnnnnnnnnnnnnnnnnnnnnnnnnnnnnnnnnnnnnnnnnnnnnnnnnnnnnnnnnnnnnnnnnnnnnnnnnnnnnnnnnnnnnnnnnnnnnnnnnnnnnnnnnnnnnnnnnnnnnnnnnnnnnnnnnnnnnnnnnnnnnnnnnnnnnnnnnnnnnnnnnnnnnnnnnnnnnnnnnnnnnnnnnnnnnnnnnnnnnnnnnnnnnnnnnnnnnnnnnnnnnnnnnnnnnnnnnnnnnnnnnnnnnnnnnnnnnnnnnnnnnnnnnnnnnnnnnnnnnnnnnnnnnnnnnnnnnnnnnnnnnnnnnnnnnnnnnnnnnnnnnnnnnnnnnnnnnnnnnnnnnnnnnnnnnnnnnnnnnnnnnnnnnnnnnnnnnnnnnnnnnnnnnnnnnnnnnnnnnnnnnnnnnnnnnnnnnnnnnnnnnnnnnnnnnnnnnnnnnnnnnnnnnnnnnnnnnnnnnnnnnnnnnnnnnnnnnnnnnnnnnnnnnnnnnnnnnnnnnnnnnnnnnnnnnnnnnnnnnnnnnnnnnnnnnnnnnnnnnnnnnnnnnnnnnnnnnnnnnnnnnnnnnnnnnnnnnnnnnnnnnnnnnnnnnnnnnnnnnnnnnnnnnnnnnnnnnnnnnnnnnnnnnnnnnnnnnnnnnnnnnnnnnnnnnnnnnnnnnnnnnnnnnnnnnnnnnnnnnnnnnnnnnnnnnnnnnnnnnnnnnnnnnnnnnnnnnnnnnnnnnnnnnnnnnnnnnnnnnnnnnnnnnnnnnnnnnnnnnnnnnnnnnnnnnnnnnnnnnnnnnnnnnnnnnnnnnnnnnnnnnnnnnnnnnnnnnnnnnnnnnnnnnnnnnnnnnnnnnnnnnnnnnnnnnnnnnnnnnnnnnnnnnnnnnnnnnnnnnnnnnnnnnnnnnnnnnnnnnnnnnnnnnnnnnnnnnnnnnnnnnnnnnnnnnnnnnnnnnnnnnnnnnnnnnnnnnnnnnnnnnnnnnnnnnnnnnnnnnnnnnnnnnnnnnnnnnnnnnnnnnnnnnnnnnnnnnnnnnnnnnnnnnnnnnnnnnnnnnnnnnnnnnnnnnnnnnnnnnnnnnnnnnnnnnnnnnnnnnnnnnnnnnnnnnnnnnnnnnnnnnnnnnnnnnnnnnnnnnnnnnnnnnnnnnnnnnnnnnnnnnnnnnnnnnnnnnnnnnnnnnnnnnnnnnnnnnnnnnnnnnnnnnnnnnnnnnnnnnnnnnnnnnnnnnnnnnnnnnnnnnnnnnnnnnnnnnnnnnnnnnnnnnnnnnnnnnnnnnnnnnnnnnnnnnnnnnnnnnnnnnnnnnnnnnnnnnnnnnnnnnnnnnnnnnnnnnnnnnnnnnnnnnnnnnnnnnnnnnnnnnnnnnnnnnnnnnnnnnnnnnnnnnnnnnnnnnnnnnnnnnnnnnnnnnnnnnnnnnnnnnnnnnnnnnnnnnnnnnnnnnnnnnnnnnnnnnnnnnnnnnnnnnnnnnnnnnnnnnnnnnnnnnnnnnnnnnnnnnnnnnnnnnnnnnnnnnnnnnnnnnnnnnnnnnnnnnnnnnnnnnnnnnnnnnnnnnnnnnnnnnnnnnnnnnnnnnnnnnnnnnnnnnnnnnnnnnnnnnnnnnnnnnnnnnnnnnnnnnnnnnnnnnnnnnnnnnnnnnnnnnnnnnnnnnnnnnnnnnnnnnnnnnnnnnnnnnnnnnnnnnnnnnnnnnnnnnnnnnnnnnnnnnnnnnnnnnnnnnnnnnnnnnnnnnnnnnnnnnnnnnnnnnnnnnnnnnnnnnnnnnnnnnnnnnnnnnnnnnnnnnnnnnnnnnnnnnnnnnnnnnnnnnnnnnnnnnnnnnnnnnnnnnnnnnnnnnnnnnnnnnnnnnnnnnnnnnnnnnnnnnnnnnnnnnnnnnnnnnnnnnnnnnnnnnnnnnnnnnnnnnnnnnnnnnnnnnnnnnnnnnnnnnnnnnnnnnnnnnnnnnnnnnnnnnnnnnnnnnnnnnnnnnnnnnnnnnnnnnnnnnnnnnnnnnnnnnnnnnnnnnnnnnnnnnnnnnnnnnnnnnnnnnnnnnnnnnnnnnnnnnnnnnnnnnnnnnnnnnnnnnnnnnnnnnnnnnnnnnnnnnnnnnnnnnnnnnnnnnnnnnnnnnnnnnnnnnnnnnnnnnnnnnnnnnnnnnnnnnnnnnnnnnnnnnnnnnnnnnnnnnnnnnnnnnnnnnnnnnnnnnnnnnnnnnnnnnnnnnnnnnnnnnnnnnnnnnnnnnnnnnnnnnnnnnnnnnnnnnnnnnnnnnnnnnnnnnnnnnnnnnnnnnnnnnnnnnnnnnnnnnnnnnnnnnnnnnnnnnnnnnnnnnnnnnnnnnnnnnnnnnnnnnnnnnnnnnnnnnnnnnnnnnnnnnnnnnnnnnnnnnnnnnnnnnnnnnnnnnnnnnnnnnnnnnnnnnnnnnnnnnnnnnnnnnnnnnnnnnnnnnnnnnnnnnnnnnnnnnnnnnnnnnnnnnnnnnnnnnnnnnnnnnnnnnnnnnnnnnnnnnnnnnnnnnnnnnnnnnnnnnnnnnnnnnnnnnnnnnnnnnnnnnnnnnnnnnnnnnnnnnnnnnnnnnnnnnnnnnnnnnnnnnnnnnnnnnnnnnnnnnnnnnnnnnnnnnnnnnnnnnnnnnnnnnnnnnnnnnnnnnnnnnnnnnnnnnnnnnnnnnnnnnnnnnnnnnnnnnnnnnnnnnnnnnnnnnnnnnnnnnnnnnnnnnnnnnnnnnnnnnnnnnnnnnnnnnnnnnnnnnnnnnnnnnnnnnnnnnnnnnnnnnnnnnnnnnnnnnnnnnnnnnnnnnnnnnnnnnnnnnnnnnnnnnnnnnnnnnnnnnnnnnnnnnnnnnnnnnnnnnnnnnnnnnnnnnnnnnnnnnnnnnnnnnnnnnnnnnnnnnnnnnnnnnnnnnnnnnnnnnnnnnnnnnnnnnnnnnnnnnnnnnnnnnnnnnnnnnnnnnnnnnnnnnnnnnnnnnnnnnnnnnnnnnnnnnnnnnnnnnnnnnnnnnnnnnnnnnnnnnnnnnnnnnnnnnnnnnnnnnnnnnnnnnnnnnnnnnnnnnnnnnnnnnnnnnnnnnnnnnnnnnnnnnnnnnnnnnnnnnnnnnnnnnnnnnnnnnnnnnnnnnnnnnnnnnnnnnnnnnnnnnnnnnnnnnnnnnnnnnnnnnnnnnnnnnnnnnnnnnnnnnnnnnnnnnnnnnnnnnnnnnnnnnnnnnnnnnnnnnnnnnnnnnnnnnnnnnnnnnnnnnnnnnnnnnnnnnnnnnnnnnnnnnnnnnnnnnnnnnnnnnnnnnnnnnnnnnnnnnnnnnnnnnnnnnnnnnnnnnnnnnnnnnnnnnnnnnnnnnnnnnnnnnnnnnnnnnnnnnnnnnnnnnnnnnnnnnnnnnnnnnnnnnnnnnnnnnnnnnnnnnnnnnnnnnnnnnnnnnnnnnnnnnnnnnnnnnnnnnnnnnnnnnnnnnnnnnnnnnnnnnnnnnnnnnnnnnnnnnnnnnnnnnnnnnnnnnnnnnnnnnnnnnnnnnnnnnnnnnnnnnnnnnnnnnnnnnnnnnnnnnnnnnnnnnnnnnnnnnnnnnnnnnnnnnnnnnnnnnnnnnnnnnnnnnnnnnnnnnnnnnnnnnnnnnnnnnnnnnnnnnnnnnnnnnnnnnnnnnnnnnnnnnnnnnnnnnnnnnnnnnnnnnnnnnnnnnnnnnnnnnnnnnnnnnnnnnnnnnnnnnnnnnnnnnnnnnnnnnnnnnnnnnnnnnnnnnnnnnnnnnnnnnnnnnnnnnnnnnnnnnnnnnnnnnnnnnnnnnnnnnnnnnnnnnnnnnnnnnnnnnnnnnnnnnnnnnnnnnnnnnnnnnnnnnnnnnnnnnnnnnnnnnnnnnnnnnnnnnnnnnnnnnnnnnnnnnnnnnnnnnnnnnnnnnnnnnnnnnnnnnnnnnnnnnnnnnnnnnnnnnnnnnnnnnnnnnnnnnnnnnnnnnnnnnnnnnnnnnnnnnnnnnnnnnnnnnnnnnnnnnnnnnnnnnnnnnnnnnnnnnnnnnnnnnnnnnnnnnnnnnnnnnnnnnnnnnnnnnnnnnnnnnnnnnnnnnnnnnnnnnnnnnnnnnnnnnnnnnnnnnnnnnnnnnnnnnnnnnnnnnnnnnnnnnnnnnnnnnnnnnnnnnnnnnnnnnnnnnnnnnnnnnnnnnnnnnnnnnnnnnnnnnnnnnnnnnnnnnnnnnnnnnnnnnnnnnnnnnnnnnnnnnnnnnnnnnnnnnnnnnnnnnnnnnnnnnnnnnnnnnnnnnnnnnnnnnnnnnnnnnnnnnnnnnnnnnnnnnnnnnnnnnnnnnnnnnnnnnnnnnnnnnnnnnnnnnnnnnnnnnnnnnnnnnnnnnnnnnnnnnnnnnnnnnnnnnnnnnnnnnnnnnnnnnnnnnnnnnnnnnnnnnnnnnnnnnnnnnnnnnnnnnnnnnnnnnnnnnnnnnnnnnnnnnnnnnnnnnnnnnnnnnnnnnnnnnnnnnnnnnnnnnnnnnnnnnnnnnnnnnnnnnnnnnnnnnnnnnnnnnnnnnnnnnnnnnnnnnnnnnnnnnnnnnnnnnnnnnnnnnnnnnnnnnnnnnnnnnnnnnnnnnnnnnnnnnnnnnnnnnnnnnnnnnnnnnnnnnnnnnnnnnnnnnnnnnnnnnnnnnnnnnnnnnnnnnnnnnnnnnnnnnnnnnnnnnnnnnnnnnnnnnnnnnnnnnnnnnnnnnnnnnnnnnnnnnnnnnnnnnnnnnnnnnnnnnnnnnnnnnnnnnnnnnnnnnnnnnnnnnnnnnnnnnnnnnnnnnnnnnnnnnnnnnnnnnnnnnnnnnnnnnnnnnnnnnnnnnnnnnnnnnnnnnnnnnnnnnnnnnnnnnnnnnnnnnnnnnnnnnnnnnnnnnnnnnnnnnnnnnnnnnnnnnnnnnnnnnnnnnnnnnnnnnnnnnnnnnnnnnnnnnnnnnnnnnnnnnnnnnnnnnnnnnnnnnnnnnnnnnnnnnnnnnnnnnnnnnnnnnnnnnnnnnnnnnnnnnnnnnnnnnnnnnnnnnnnnnnnnnnnnnnnnnnnnnnnnnnnnnnnnnnnnnnnnnnnnnnnnnnnnnnnnnnnnnnnnnnnnnnnnnnnnnnnnnnnnnnnnnnnnnnnnnnnnnnnnnnnnnnnnnnnnnnnnnnnnnnnnnnnnnnnnnnnnnnnnnnnnnnnnnnnnnnnnnnnnnnnnnnnnnnnnnnnnnnnnnnnnnnnnnnnnnnnnnnnnnnnnnnnnnnnnnnnnnnnnnnnnnnnnnnnnnnnnnnnnnnnnnnnnnnnnnnnnnnnnnnnnnnnnnnnnnnnnnnnnnnnnnnnnnnnnnnnnnnnnnnnnnnnnnnnnnnnnnnnnnnnnnnnnnnnnnnnnnnnnnnnnnnnnnnnnnnnnnnnnnnnnnnnnnnnnnnnnnnnnnnnnnnnnnnnnnnnnnnnnnnnnnnnnnnnnnnnnnnnnnnnnnnnnnnnnnnnnnnnnnnnnnnnnnnnnnnnnnnnnnnnnnnnnnnnnnnnnnnnnnnnnnnnnnnnnnnnnnnnnnnnnnnnnnnnnnnnnnnnnnnnnnnnnnnnnnnnnnnnnnnnnnnnnnnnnnnnnnnnnnnnnnnnnnnnnnnnnnnnnnnnnnnnnnnnnnnnnnnnnnnnnnnnnnnnnnnnnnnnnnnnnnnnnnnnnnnnnnnnnnnnnnnnnnnnnnnnnnnnnnnnnnnnnnnnnnnnnnnnnnnnnnnnnnnnnnnnnnnnnnnnnnnnnnnnnnnnnnnnnnnnnnnnnnnnnnnnnnnnnnnnnnnnnnnnnnnnnnnnnnnnnnnnnnnnnnnnnnnnnnnnnnnnnnnnnnnnnnnnnnnnnnnnnnnnnnnnnnnnnnnnnnnnnnnnnnnnnnnnnnnnnnnnnnnnnnnnnnnnnnnnnnnnnnnnnnnnnnnnnnnnnnnnnnnnnnnnnnnnnnnnnnnnnnnnnnnnnnnnnnnnnnnnnnnnnnnnnnnnnnnnnnnnnnnnnnnnnnnnnnnnnnnnnnnnnnnnnnnnnnnnnnnnnnnnnnnnnnnnnnnnnnnnnnnnnnnnnnnnnnnnnnnnnnnnnnnnnnnnnnnnnnnnnnnnnnnnnnnnnnnnnnnnnnnnnnnnnnnnnnnnnnnnnnnnnnnnnnnnnnnnnnnnnnnnnnnnnnnnnnnnnnnnnnnnnnnnnnnnnnnnnnnnnnnnnnnnnnnnnnnnnnnnnnnnnnnnnnnnnnnnnnnnnnnnnnnnnnnnnnnnnnnnnnnnnnnnnnnnnnnnnnnnnnnnnnnnnnnnnnnnnnnnnnnnnnnnnnnnnnnnnnnnnnnnnnnnnnnnnnnnnnnnnnnnnnnnnnnnnnnnnnnnnnnnnnnnnnnnnnnnnnnnnnnnnnnnnnnnnnnnnnnnnnnnnnnnnnnnnnnnnnnnnnnnnnnnnnnnnnnnnnnnnnnnnnnnnnnnnnnnnnnnnnnnnnnnnnnnnnnnnnnnnnnnnnnnnnnnnnnnnnnnnnnnnnnnnnnnnnnnnnnnnnnnnnnnnnnnnnnnnnnnnnnnnnnnnnnnnnnnnnnnnnnnnnnnnnnnnnnnnnnnnnnnnnnnnnnnnnnnnnnnnnnnnnnnnnnnnnnnnnnnnnnnnnnnnnnnnnnnnnnnnnnnnnnnnnnnnnnnnnnnnnnnnnnnnnnnnnnnnnnnnnnnnnnnnnnnnnnnnnnnnnnnnnnnnnnnnnnnnnnnnnnnnnnnnnnnnnnnnnnnnnnnnnnnnnnnnnnnnnnnnnnnnnnnnnnnnnnnnnnnnnnnnnnnnnnnnnnnnnnnnnnnnnnnnnnnnnnnnnnnnnnnnnnnnnnnnnnnnnnnnnnnnnnnnnnnnnnnnnnnnnnnnnnnnnnnnnnnnnnnnnnnnnnnnnnnnnnnnnnnnnnnnnnnnnnnnnnnnnnnnnnnnnnnnnnnnnnnnnnnnnnnnnnnnnnnnnnnnnnnnnnnnnnnnnnnnnnnnnnnnnnnnnnnnnnnnnnnnnnnnnnnnnnnnnnnnnnnnnnnnnnnnnnnnnnnnnnnnnnnnnnnnnnnnnnnnnnnnnnnnnnnnnnnnnnnnnnnnnnnnnnnnnnnnnnnnnnnnnnnnnnnnnnnnnnnnnnnnnnnnnnnnnnnnnnnnnnnnnnnnnnnnnnnnnnnnnnnnnnnnnnnnnnnnnnnnnnnnnnnnnnnnnnnnnnnnnnnnnnnnnnnnnnnnnnnnnnnnnnnnnnnnnnnnnnnnnnnnnnnnnnnnnnnnnnnnnnnnnnnnnnnnnnnnnnnnnnnnnnnnnnnnnnnnnnnnnnnnnnnnnnnnnnnnnnnnnnnnnnnnnnnnnnnnnnnnnnnnnnnnnnnnnnnnnnnnnnnnnnnnnnnnnnnnnnnnnnnnnnnnnnnnnnnnnnnnnnnnnnnnnnnnnnnnnnnnnnnnnnnnnnnnnnnnnnnnnnnnnnnnnnnnnnnnnnnnnnnnnnnnnnnnnnnnnnnnnnnnnnnnnnnnnnnnnnnnnnnnnnnnnnnnnnnnnnnnnnnnnnnnnnnnnnnnnnnnnnnnnnnnnnnnnnnnnnnnnnnnnnnnnnnnnnnnnnnnnnnnnnnnnnnnnnnnnnnnnnnnnnnnnnnnnnnnnnnnnnnnnnnnnnnnnnnnnnnnnnnnnnnnnnnnnnnnnnnnnnnnnnnnnnnnnnnnnnnnnnnnnnnnnnnnnnnnnnnnnnnnnnnnnnnnnnnnnnnnnnnnnnnnnnnnnnnnnnnnnnnnnnnnnnnnnnnnnnnnnnnnnnnnnnnnnnnnnnnnnnnnnnnnnnnnnnnnnnnnnnnnnnnnnnnnnnnnnnnnnnnnnnnnnnnnnnnnnnnnnnnnnnnnnnnnnnnnnnnnnnnnnnnnnnnnnnnnnnnnnnnnnnnnnnnnnnnnnnnnnnnnnnnnnnnnnnnnnnnnnnnnnnnnnnnnnnnnnnnnnnnnnnnnnnnnnnnnnnnnnnnnnnnnnnnnnnnnnnnnnnnnnnnnnnnnnnnnnnnnnnnnnnnnnnnnnnnnnnnnnnnnnnnnnnnnnnnnnnnnnnnnnnnnnnnnnnnnnnnnnnnnnnnnnnnnnnnnnnnnnnnnnnnnnnnnnnnnnnnnnnnnnnnnnnnnnnnnnnnnnnnnnnnnnnnnnnnnnnnnnnnnnnnnnnnnnnnnnnnnnnnnnnnnnnnnnnnnnnnnnnnnnnnnnnnnnnnnnnnnnnnnnnnnnnnnnnnnnnnnnnnnnnnnnnnnnnnnnnnnnnnnnnnnnnnnnnnnnnnnnnnnnnnnnnnnnnnnnnnnnnnnnnnnnnnnnnnnnnnnnnnnnnnnnnnnnnnnnnnnnnnnnnnnnnnnnnnnnnnnnnnnnnnnnnnnnnnnnnnnnnnnnnnnnnnnnnnnnnnnnnnnnnnnnnnnnnnnnnnnnnnnnnnnnnnnnnnnnnnnnnnnnnnnnnnnnnnnnnnnnnnnnnnnnnnnnnnnnnnnnnnnnnnnnnnnnnnnnnnnnnnnnnnnnnnnnnnnnnnnnnnnnnnnnnnnnnnnnnnnnnnnnnnnnnnnnnnnnnnnnnnnnnnnnnnnnnnnnnnnnnnnnnnnnnnnnnnnnnnnnnnnnnnnnnnnnnnnnnnnnnnnnnnnnnnnnnnnnnnnnnnnnnnnnnnnnnnnnnnnnnnnnnnnnnnnnnnnnnnnnnnnnnnnnnnnnnnnnnnnnnnnnnnnnnnnnnnnnnnnnnnnnnnnnnnnnnnnnnnnnnnnnnnnnnnnnnnnnnnnnnnnnnnnnnnnnnnnnnnnnnnnnnnnnnnnnnnnnnnnnnnnnnnnnnnnnnnnnnnnnnnnnnnnnnnnnnnnnnnnnnnnnnnnnnnnnnnnnnnnnnnnnnnnnnnnnnnnnnnnnnnnnnnnnnnnnnnnnnnnnnnnnnnnnnnnnnnnnnnnnnnnnnnnnnnnnnnnnnnnnnnnnnnnnnnnnnnnnnnnnnnnnnnnnnnnnnnnnnnnnnnnnnnnnnnnnnnnnnnnnnnnnnnnnnnnnnnnnnnnnnnnnnnnnnnnnnnnnnnnnnnnnnnnnnnnnnnnnnnnnnnnnnnnnnnnnnnnnnnnnnnnnnnnnnnnnnnnnnnnnnnnnnnnnnnnnnnnnnnnnnnnnnnnnnnnnnnnnnnnnnnnnnnnnnnnnnnnnnnnnnnnnnnnnnnnnnnnnnnnnnnnnnnnnnnnnnnnnnnnnnnnnnnnnnnnnnnnnnnnnnnnnnnnnnnnnnnnnnnnnnnnnnnnnnnnnnnnnnnnnnnnnnnnnnnnnnnnnnnnnnnnnnnnnnnnnnnnnnnnnnnnnnnnnnnnnnnnnnnnnnnnnnnnnnnnnnnnnnnnnnnnnnnnnnnnnnnnnnnnnnnnnnnnnnnnnnnnnnnnnnnnnnnnnnnnnnnnnnnnnnnnnnnnnnnnnnnnnnnnnnnnnnnnnnnnnnnnnnnnnnnnnnnnnnnnnnnnnnnnnnnnnnnnnnnnnnnnnnnnnnnnnnnnnnnnnnnnnnnnnnnnnnnnnnnnnnnnnnnnnnnnnnnnnnnnnnnnnnnnnnnnnnnnnnnnnnnnnnnnnnnnnnnnnnnnnnnnnnnnnnnnnnnnnnnnnnnnnnnnnnnnnnnnnnnnnnnnnnnnnnnnnnnnnnnnnnnnnnnnnnnnnnnnnnnnnnnnnnnnnnnnnnnnnnnnnnnnnnnnnnnnnnnnnnnnnnnnnnnnnnnnnnnnnnnnnnnnnnnnnnnnnnnnnnnnnnnnnnnnnnnnnnnnnnnnnnnnnnnnnnnnnnnnnnnnnnnnnnnnnnnnnnnnnnnnnnnnnnnnnnnnnnnnnnnnnnnnnnnnnnnnnnnnnnnnnnnnnnnnnnnnnnnnnnnnnnnnnnnnnnnnnnnnnnnnnnnnnnnnnnnnnnnnnnnnnnnnnnnnnnnnnnnnnnnnnnnnnnnnnnnnnnnnnnnnnnnnnnnnnnnnnnnnnnnnnnnnnnnnnnnnnnnnnnnnnnnnnnnnnnnnnnnnnnnnnnnnnnnnnnnnnnnnnnnnnnnnnnnnnnnnnnnnnnnnnnnnnnnnnnnnnnnnnnnnnnnnnnnnnnnnnnnnnnnnnnnnnnnnnnnnnnnnnnnnnnnnnnnnnnnnnnnnnnnnnnnnnnnnnnnnnnnnnnnnnnnnnnnnnnnnnnnnnnnnnnnnnnnnnnnnnnnnnnnnnnnnnnnnnnnnnnnnnnnnnnnnnnnnnnnnnnnnnnnnnnnnnnnnnnnnnnnnnnnnnnnnnnnnnnnnnnnnnnnnnnnnnnnnnnnnnnnnnnnnnnnnnnnnnnnnnnnnnnnnnnnnnnnnnnnnnnnnnnnnnnnnnnnnnnnnnnnnnnnnnnnnnnnnnnnnnnnnnnnnnnnnnnnnnnnnnnnnnnnnnnnnnnnnnnnnnnnnnnnnnnnnnnnnnnnnnnnnnnnnnnnnnnnnnnnnnnnnnnnnnnnnnnnnnnnnnnnnnnnnnnnnnnnnnnnnnnnnnnnnnnnnnnnnnnnnnnnnnnnnnnnnnnnnnnnnnnnnnnnnnnnnnnnnnnnnnnnnnnnnnnnnnnnnnnnnnnnnnnnnnnnnnnnnnnnnnnnnnnnnnnnnnnnnnnnnnnnnnnnnnnnnnnnnnnnnnnnnnnnnnnnnnnnnnnnnnnnnnnnnnnnnnnnnnnnnnnnnnnnnnnnnnnnnnnnnnnnnnnnnnnnnnnnnnnnnnnnnnnnnnnnnnnnnnnnnnnnnnnnnnnnnnnnnnnnnnnnnnnnnnnnnnnnnnnnnnnnnnnnnnnnnnnnnnnnnnnnnnnnnnnnnnnnnnnnnnnnnnnnnnnnnnnnnnnnnnnnnnnnnnnnnnnnnnnnnnnnnnnnnnnnnnnnnnnnnnnnnnnnnnnnnnnnnnnnnnnnnnnnnnnnnnnnnnnnnnnnnnnnnnnnnnnnnnnnnnnnnnnnnnnnnnnnnnnnnnnnnnnnnnnnnnnnnnnnnnnnnnnnnnnnnnnnnnnnnnnnnnnnnnnnnnnnnnnnnnnnnnnnnnnnnnnnnnnnnnnnnnnnnnnnnnnnnnnnnnnnnnnnnnnnnnnnnnnnnnnnnnnnnnnnnnnnnnnnnnnnnnnnnnnnnnnnnnnnnnnnnnnnnnnnnnnnnnnnnnnnnnnnnnnnnnnnnnnnnnnnnnnnnnnnnnnnnnnnnnnnnnnnnnnnnnnnnnnnnnnnnnnnnnnnnnnnnnnnnnnnnnnnnnnnnnnnnnnnnnnnnnnnnnnnnnnnnnnnnnnnnnnnnnnnnnnnnnnnnnnnnnnnnnnnnnnnnnnnnnnnnnnnnnnnnnnnnnnnnnnnnnnnnnnnnnnnnnnnnnnnnnnnnnnnnnnnnnnnnnnnnnnnnnnnnnnnnnnnnnnnnnnnnnnnnnnnnnnnnnnnnnnnnnnnnnnnnnnnnnnnnnnnnnnnnnnnnnnnnnnnnnnnnnnnnnnnnnnnnnnnnnnnnnnnnnnnnnnnnnnnnnnnnnnnnnnnnnnnnnnnnnnnnnnnnnnnnnnnnnnnnnnnnnnnnnnnnnnnnnnnnnnnnnnnnnnnnnnnnnnnnnnnnnnnnnnnnnnnnnnnnnnnnnnnnnnnnnnnnnnnnnnnnnnnnnnnnnnnnnnnnnnnnnnnnnnnnnnnnnnnnnnnnnnnnnnnnnnnnnnnnnnnnnnnnnnnnnnnnnnnnnnnnnnnnnnnnnnnnnnnnnnnnnnnnnnnnnnnnnnnnnnnnnnnnnnnnnnnnnnnnnnnnnnnnnnnnnnnnnnnnnnnnnnnnnnnnnnnnnnnnnnnnnnnnnnnnnnnnnnnnnnnnnnnnnnnnnnnnnnnnnnnnnnnnnnnnnnnnnnnnnnnnnnnnnnnnnnnnnnnnnnnnnnnnnnnnnnnnnnnnnnnnnnnnnnnnnnnnnnnnnnnnnnnnnnnnnnnnnnnnnnnnnnnnnnnnnnnnnnnnnnnnnnnnnnnnnnnnnnnnnnnnnnnnnnnnnnnnnnnnnnnnnnnnnnnnnnnnnnnnnnnnnnnnnnnnnnnnnnnnnnnnnnnnnnnnnnnnnnnnnnnnnnnnnnnnnnnnnnnnnnnnnnnnnnnnnnnnnnnnnnnnnnnnnnnnnnnnnnnnnnnnnnnnnnnnnnnnnnnnnnnnnnnnnnnnnnnnnnnnnnnnnnnnnnnnnnnnnnnnnnnnnnnnnnnnnnnnnnnnnnnnnnnnnnnnnnnnnnnnnnnnnnnnnnnnnnnnnnnnnnnnnnnnnnnnnnnnnnnnnnnnnnnnnnnnnnnnnnnnnnnnnnnnnnnnnnnnnnnnnnnnnnnnnnnnnnnnnnnnnnnnnnnnnnnnnnnnnnnnnnnnnnnnnnnnnnnnnnnnnnnnnnnnnnnnnnnnnnnnnnnnnnnnnnnnnnnnnnnnnnnnnnnnnnnnnnnnnnnnnnnnnnnnnnnnnnnnnnnnnnnnnnnnnnnnnnnnnnnnnnnnnnnnnnnnnnnnnnnnnnnnnnnnnnnnnnnnnnnnnnnnnnnnnnnnnnnnnnnnnnnnnnnnnnnnnnnnnnnnnnnnnnnnnnnnnnnnnnnnnnnnnnnnnnnnnnnnnnnnnnnnnnnnnnnnnnnnnnnnnnnnnnnnnnnnnnnnnnnnnnnnnnnnnnnnnnnnnnnnnnnnnnnnnnnnnnnnnnnnnnnnnnnnnnnnnnnnnnnnnnnnnnnnnnnnnnnnnnnnnnnnnnnnnnnnnnnnnnnnnnnnnnnnnnnnnnnnnnnnnnnnnnnnnnnnnnnnnnnnnnnnnnnnnnnnnnnnnnnnnnnnnnnnnnnnnnnnnnnnnnnnnnnnnnnnnnnnnnngatctgggccctctgcaatgtacacttgaggctgcttccatggagggaaagattttcttttcccaaatcttggatctggctggccttatttgctctgcctcattcatactttttgttctaataaaataattaagatgtttagcgtctcatcccagcctttatcttgttaaaactatatcttatgatatgtcatctctctttactatatttggttatattcattctattcaatactcaggtaattttttatctctgtttaatttagtgtttcacctataccttgtcctaatttttttattctttacattctaccgagctgtgattcaaatatgatatttgaatatggaaaatggtggcctagtttttcttcagaaatttctttttatttacttgtgttctttagtttttaacttggttccaatatttgggaaatatcacatttgagatgtctgtagtcatgttatttctgtgcttattccattttcccttggaggaaggtggacagcatacagacttgacatccttgtgatctatcagtatctgaagggaccactttttttcagtttgattacttctctggcttattctcttgatttactttagctttcatcaagtgcttctatatttttaaactgtattcattattttcatagttcttgtagcttcttgagaacttttacttgtctacactaaaatatttaaaaatatgtagccttttcttctgaaagcacaaatatgcagtgtacacatgagtagaatatttcataggcattgggcagcatacaaccacatcttatgagatattccgtttcttcattcaaaacatctctctcaaatatgtagtaatagtcacttgtaaggggtagttcttttgatacttaaaattttcttttatgtgcctttatgaaaatatatacttaactacagagaacagaactctgtgcttccttttagtatgtccttgacctcacaaaaataattcatgaaatcttatatttattttataaattaatttaatgaaacaaaatttgtgcatggctaaatattacttgttgagtacaatttagaatttctactgtcattttagtgtcctaaaagatatgagctgttgaatttctgctctcataaaatgaatgatattgttaggcctaaacccttgccatttattttccccctctgtcatacagtgtgtatctttggttcactgctgaaaaattttattaatttttctctcttgctagtagtcatactttctaataaagttatcattacttgtgtttatttagttactgtatgttaaacatttgatttctgatggtcttaatgtcatttaatataattgtaaatatttcaatttgtcattattaacaaatttctgtattatatgttttagactcagctattaagtatatgtgggtaaatgacttagaataatttctaaaacattgtaggggctactaagtactaataaccctgattcattaaatttttattccttataatattctttattgactaaattattttgtaatcttatttaaatttattcttttcttttctaaatatttgtgaaaaaggggttaggctaatgtgtcattttgataaaacttcatgtcaaatgatatgtttcactggtttcttttagatgtaatagcttttttgactcaggcaatacatgcaagtatgaagtataaaaattatagtctcaatccttaagctgagtaaaaacttggctatttattgattttaacaaagctacattatcccacataatacgtaaaactttcacaaagctacattatcccacataacaggcataccagctgcctatatctggaaacatggattgttacaaattagaagtaaataacttgataggcccaatttaacaaatgaagctcaagaagtgggagatatgagacctataatgaaagattaaattattttaaaaatcttaccacaaagaaaaatcagagtcaaatactttaactgttaaattatacaaaatatttcataaaaataccaatcctttacaaatacacaccatacatagataagagataaacaacccctaactactttatgaggccaatattactataccaaagccagacaaacccatcatgtgttaggattaatatgggtacatacggctgataaataaagacacataattctcaaaaagtactaataagttaaatacagaaacacgtaaaagtaattatacaccatggccaagtacaatctttttacaaatgaagtggcttaatatctaaaaaccaataatttaatacacaacattgataaagtgaagaacataaaatgatccttttaatagacacagaaaagcttgtgatacaaacaacactgattcattataaaatccttaacatactaggaaggaaaaacttactggaactactaaaaaggattcataaaaatttcccactaatattacacttgctgatgaaagactaggctctttgcctcacagttgtgggaaacagataagcatggctactttcgctactctactaaattgaactaaaggtgttaggcagagaaattatataataaaaacaaataaaacttctaaatttataaaataaacttttattgtaaatggcatcaacttatattcaagaatttttaaagagtttacaaaaatcaactggaactaataaatgagttcagcaggtcacaagatacaagataaatgcacaatattaaattgcacttttatacagtaactaagggcaatcagtaaataaaattagaaaaaataattctactcattagctcaatgtgtagtggcttaaaattccaaatatgcattatgtcttattttctgttggctacaaatactgacacagcttagttgaatgggtctaccacaatgtcctcatgtgtccggaattggtcggttcttggtctcactgacttcaagaatgaagccgcggaccctcacggtgagtgttacagttcttaaaggcagcgtgcctggagtttttcccttctaatgtcagcatgtgtttggagtttctttcttctggtgggttcgtggtctttctggctcaggagtgaagctgcagacctttgtggtgagtgttacagctcataaaggcagtgtggacgcaaagagtgagcagcagcaggatttattgcaaagagcgaaagaacaaagcttccacagtgtggatggggacccgagagggttgccactgctggctcgggcagctgcttttattctcttatctggccccacccacatcctgctgattggtccattttacagggagccaattggtctgttttacagagagctgattggtcccttttcacagggtgctgattgatgcatttacaatccttgagctagacacaaagttcaccacgtctctactagattagctagatacagagtgttgattggtgtatttacaaaccctgagctagacacggggtgctcatttgtgtgtttataaaccttgagctagatacaaagtgtcgattggtgtatttacaatcccttatctagacataaagtttctccaagtccccaccagactcaggagcccagctggcttcacccagtggatcccgcaccagggccgcaggtggagctgcctgcctgccagtcacacgctgtgctcccgaactcctcagcccttgggttgtcgatgggactgggtgccatggaacagggggtggagctcgttggggaggctcgggccgcacaggagcccttggcaggagtgggggagaggctcaggcaaggtgggctgcagttcccgagccctgccccgtggggaggcagctaaggcctggcgagaagtcgagcacagcagctgctggcccaggtgctaagcccctcactgcctggggctggcggggccagctggccgctccaagtgcggggccgccaagcccacgcccacccggaactcgcgctggcccggaagcaccgcgggcagccgcggttcctgcccgctccccgcaagataagggagccggctccggcattggcctgctgagaaaggggctcccacagtgcagcggtgagctgaagggctcctcaagcgcggccagagtgggcaccaaggctgaggaggcaccaagagtgagcgagggctgtgagggctgccagcatgctgtcacctctcactcatgagactgaagctgtgtctcaactgaagcttgactgggaaggatgcacttctgagctcaatctggttagttgtgcattattgttttgactcagttcttagtttctttctgtctttggtcagggcactctctctattctctgtcacacaagcctgtaaaaatgaaagcttaaaacactgaagctcgcttctccagagcaaagtatgcgacagacagagagaaagacaggaaaaaaggaagtaaacaatatcacaagagagagaaagtaagaagcaagtgacaatcttttcataatcaaatattggcagtgacattccctattttccaatgtattctactgccatgaagtgagtcactaaccacttactgtttacatttgggtgtgtatagttggaaataaaaattattatgagccatcatgaaggctgtgcactacgtatgccaaggtgagacaaatgggcctgattctaaatataacgagaaggtactacaatgtgtgttgttgttattgttgttgttctggccaaagaataacaacatctaaattttattcaatttcaatgttttcatggtggagtttgaaaaataaattcaagaggggacatgactttctcaagattcaagttataaaacccaggcatgtttgagagatattcaagcaatgtcccatcccttgtagtttctttctctaagtttatgcagtagctgtgtttaatatcaaacccaacagtcatgcgtatcattttatacatatctcatgagatcccttgcagctggatgccaccataatccccactgtgcaggctgtgagactatggagcccctgagaggcacaatgacatacttggcatcacataattaatacattaaacataaagactttaactcagcttgtatcctcaaacttgtggctctggctgcattccatttcctccggcactggtgcaggaggtgctgtatttgcataattgtgcacaagtaatcagatgacttgggagagaatggtgagcagtcagcagtgcagaaaagcctttgagtaggtcttattgaaggaagataggtcttattgaaagaagaataataccttcaagaagtgacctcatttctttggtgaaaggtcctaacagtactaagtattctggtaaccaaaaactcacattctaaagacagtccaccatgcagcactgttggccagaatctctcaagagagaaagatgttctgctgtataacaactttctgaggctctttcttgtgaggttctgttcctcacaagtagcaccttctagctatgtcttcacacgacagaaggggcatgaatattcctttcaacctccgtcacacgggcactattattttctcgttaacatgcagccctcctgacttaataactttctcaaagttccaataactaatagtatcacactgaatccacgtgtggattaagtttttaaatatgaatgtggagagtgaggaacacaaatatccagaccatagcaaaaagttaataagcaataacaattgcagtggacagtattattaatgcttgggatatgggaatttgatgtttctatcacaaaggttaaacaatggtttatccttggccgggcatgatggctcaagcctgtaatccaagcactttgggatgtcaaggcaggcggatcacaaggtcaggagatcgagaccatcctggctaatacggtgaaaccccgtctctactaaaagtccaaaaacattgctgggtgtggtggcgggcgcctgtagtccccgctactagggaagctgaggcaggaaaaaggtgtgaacccaggaggtggagctttcagtgagctgagatcacaccagtgcactacagcctcggagacacagcaagactccatcaaaaaaataaaattaaattaaaacatataacaaaattaaggtccaattaaaggtaaatatatatagcaaaaaaaaaattcaagctctgataaggttaattgtaacagattgtgccagaattttgagatttctggagatggacagagcccaagagtttccttctataacaatttctgtgaagtttcttacactcttattcaatttgaacgtggataaatgggttttctctgttttgttatttaagagattcatgataaggaaggcctatttatgcatgattcttaaacaattattgagtcagtggtgtctgctgaggaagggcacagaatctcatgcccacagaagcatgatgttctgtcagataggagacttctcccagagccagaacttcatctttcaaatggaattagagattttcacaggcatacattgctctgaagccctatcagaggcttagcactgagaatatgaccaaagaaggtgactaataaacatatgacctagtactctgatctacagtgattctaccctctcaaatagctcttccctggctctggaatcttttctggattcatctaccagaaacagatacactgaaagattgagaagaagcttttattctcactgtgagtcttgccctgtctcaccatcttctctagaagtgcaatgttctaactattcctgagagacttcatctcaggtagctctctctgacaacataattgagaagagaaacgagcaagactcagattattttgaaggcttgtctagggttcttacatgatttatgtctccaatttatgtcaatattgacaaatatagattcatctctagatggtagaaaaacagaaggaggagcctctgctcacagagaaaataaaagatgaattcaatgttttgtagagccagcttattttaaaccatggggcatttaatctttttagaaaaaaacaaaagcaatagggttttttgtttttgtttttgcttttgcttttgtgttttcgttttggtttttttttgtttgtttgttttttccctgaagcaactcaactgtggcctcagacaactgggcactgagaacgcatgctcctcactagaatttcattactacattgcagagaaatgggataattacaaaggatttttttttttttgagatggagtcttcctctgtcatccaagatggagtgcagtggcatcatctcagctcacagcaaccttggtctctcaggttgaagcaattctcctgcctcagcctcccaaatagctgggactacaggcatgtgccaccttgcctgggtaatttttatatttttagtacagactgggttccaccatgttggccagatggtctcgatttcctgacctcgttatccaccctccttggtcacctaaagtgctgggtgtgagctgctgtgcccagcccaaaggattcttaagggtgatatgggggatggaatggaaaaaataaacttagtctttgcacttccacctggtctaactaaccctactctcatcctatcccaaaattattgccagacttttctggagtgtgccaggggcaattcagaaggaaaagaggttattcatgcctatccatttcccatagctcctgagatctaagtcgttcactcccctggtttcaggttgttgctccccttctatatcctcagaattaatgtgatccattccaatacttataattgtacctttatctgatcccctcctattttgctgtagacattttatgtagtagatccagttgtaatagagacaagaatgtttatatacaccataatcagaactaaattggagttccataaccccttttttgactgggctgctactcagaaatcatacaaaccaggctgcctggaggttgcagttaggagaaatcacatcttgcccaggaatgtcagtgtggaaactcagatttggaaaatagattcctatagccccaatcattttgcaacacttctgcagagttaaaagaaagccagtatctaacagaaaatcttgagcttgcagaataacagaaaagaaaaaaaaaacaaaaacacaacttgccaaaacactgaaactccctctacttatgaaataaacaaactggcttaaattggtggaatcattatggccaaatggtgttttggcagaatcaccttgctgaggtcaccgtctgaattttcactgcctgtttcatcacaactccccttcagtttgcccatgacatccatgaggaggcaatgagcttgagagtaacgtttcagtataaaattgctttctcttaaaaacctgatgtcatagtattggcttctagcacttcaagaagtgagctccttttactcaataacaatgttatctatatcttagagacagtcaacaggagataatctcttctgggaccaaagaaggtgactaataaaccatttaatcaacacattacctaaccaaaagctgtggaccctgatgaggaaaataagttaaaatgagactattggctcattttaatagatatggtgataaaagcaaaaaaaaaaaaaaaaaaagagagaatttaagcggtctcaaatacctaaaagatgacatggattagcttcaagtaacacataatgtggctggagtcagctgatctttatgctgaaagtgtcaacagtagtgacaaatacttcaagtaacgggtcaaaagtctaagacagtcattctgccagaaatggtctgggacttccccatacatgggacacgtagatcaactttctccaagaaccaccaacctggcatgcagtgatgacctctgcagtagacagggatttaggcttgattgttgttcatctctttggagacataaccctaattgtgaacttctaaattaatggcctgacaattagatcagcagctaagataaatttcagtttgcagccccaaagaagatgttcttaattagacagttaatcattttcaatatggaagcctaaacacgtagaatgtggcaataacccggaactctcagttctgacaattgagtgaagtaatcaccccagattcaggttcctcattggctgacaatgagatcaaacacccacaccagcccagtgaacaccatgaggtgtcatcttccctggcccattagtgaaccaggaacagatatttagaaaatattcagtaaattggggagtcccacagagtcagaaagtttgcttgagatagtagagggtggcataaaatttctaccgaatatgaattttaatttttactttagtgccgtttctattttagtctaatttccttctagaatatgttatttctatttaccaagtggcctcctgtggtctttttcatagagttcaaatcgacccatctaaaaacagaaagatcaagctaacgacctccctcaggggtcagaattcagtttcacagctctgtagcaagctcattgttgacttacaaattagtgtaaccaatagtaacgtcatggtgaccataactccaacatcccaaaaagtacctcaagttagaggctgacttcatttatcagaggattcaaatggcaaaatcaagctttactagatcactggattactggaagaagtgagcaatgcgaatctgcaatatagtttcactaaactttaataggacagcaagactgtagatattttagccctctcaaaatatgaatcttctgatcctttcatctagaatctctatgtgtgccataaagtcctaactctgcttgtgcctatactttctgttcatgcagagattaaaagacaaacaggtgggagcttagtgttttagcgtttttcctgagaatctgtctagcctagagcatccccatttttttctagattccaaggagtactatcactatcctaattctcagtgtcttgtttccaagtatttcctcctacgattgtcagcgtgactacctttttaccccactgatagtgtttgctccaggtgaactgggtagttcatttttatttaaatgcttccataagcgttaagctattaatttaagatttctttgttttttataaagtaattctgctgtttccctcagagctcaactttcactaagtctcataaattttattatgttttgtctaaatgtctatttatgttaaaatattctctgacactatttgtacattttttattcattaattatttaagattgtgtcatttaatgcacacatgtttgcatttcccaaatttcttgcttttttggtctctaattttctcttttgtgattagaaaacattcattttattatttcaatctttcaattttattgattttttttatgatgcagcatattctccattctagagaatgttctatgtgcatttgggaagaatatacattctgatttggggtgaagagttctccatatatctctagttttatttggtttatgttattcatgtcttctatttccttgtttctcttatgtctagttcttctacccaatagtgtaagtggggaagtgaagcttgcaatttttattgttgaaactattgttgcaactatttctgcctttatttctatcagttttgctttatgtacttctgtgaacttttgttacattcatatatgttaatttattttcctcatgaatttatccttctaattataatctatcttcatctctagtaatagtatttgttgtcttaaagtatatcctaatttttttatttttggtttttctgggtgcatagtaggtgtatacctttatgaagtatatagaatattttgataccgtcatacaatgtgtaataattacatcagagtcaatggggtattcatcacatgaagtattactattggatttcaaataaccaaattatacaatttctgttattttaaaatgtacacttaaattattcttaactagagtcaccttgtgctgtcaaatgctagaactgattcattctttctaactatatttttatacccattaaccattcccacctccccgccctcaaccttctactacttctctcagcctctggagaccatcattctactctttatctccattaattctttggttttaatttttagctttaacaaataagtgagaacgtgtgaagtttgtctttctatacctggcttatttcacttaataaaatgaccttcagtttaacccatgtttttacaaatgacagaatctcattcatttttatgtctgaatagtactacattgtgtatatgtaccacttttttgtttattcatctgtcgataaacacctatgttacttccaaatcttggctattgtgaatagtgttgcagtaaacacaggagtacagctatcacttcaatacacagatttttctctcttttggatatatacctaacagtgaaattgctggattgtacagaagctctatttttagttttctgatgaaccttcaagctgttctccatagtggttccaccaacttacattcccaccaacagcatatgagggttcccttttctccgcatgcttgtcagcatttgttattgccttttagctaaaacccactttaactggggtgaggtaatagctcattgtaattttgatttgcatttctctgatgattcatgatgttgatcatcttttcatatacctatttgccatttgcgtgtctttattggagtaatgtctgtttacatattttgcctattttttaaaataggattattagattttattttctatagagttatttgagcgccttctatgttttggttacaaatccattttcagataggtagtttgaaaatattttctttcattctgtgggttgttttctgactttgttgattcttttctgtgccatgcaaaattttataacttggtgtgataccaattttccattttgctttggttgcctgtgcttgtgaggtgttactcaagaaatctttgcttaatccaaggttttttagaatttccccaatgttttctttcagaagtttcatagtttgcagttttacatttaaatatttaatccattttgatttagtttttgcacatggcaaaagatagaggtctagttttattcctctgcatatggatatccagatttaccatcactgtttattgaagagactgagtttttattcttaatatattttcttggtgcctatgtaaaaaatgagttcactgtagatggatggtttggttctgggttctctattctgctccattttcctgtgtgtctgtttttatgccagtactatgctgttttggttactacacatcggtagtataattttgtgtaatgtaataatgtatgctatgtaatgggattcctccagttttattctttttgctcaggatagctttagctattctaggtcttttgtgattatatataaatttaagattttttagagctgttgtatttatttgtgtgaggaatgtcaatggtatttttacagaaattgcgttgaatctgtagcttgctttgtgtagcatggacattttaatattgattcttccaatccataaacacagaacactgactaatacaatctgcaaatgggtagtttgacttcctctcctcttatttgaatgcctttatttttttctcttgtctgattgctctggccaggattttcaatactatgttgaacagggctggtaagagagggcatctttgtcttgtgccagtttccaagaaaaatgcttccagtttcacccattcagtataaagttggctgtgggtttgtcatagatgacttttattatttcaaagcatgtttcctcaatacctagtatatggagagttttaacataaagtggttttgaattttaatgaaagctctttctgcatctattacaataatcatgaggtttttgtctttcgttctgtttgtattatgaatcacatttattgatttgcatatgttgaaccaaccttgcatcccagggaaaaagcctacttgattgtggtggataggctttttggtgtgctgctggatttggtttgccagtattttatggagaatttttgcatcaatattcatcaaagatatgaaatttttctttcttttgcttttcttccaggttttgatatcagaagggtgctggcctcataggatgagtgaggaagatgatcctcctcaaatttttgggagtttcagtaggaatgataccaaattcttctttgcatatccagtagaatttggctgggaattcgtcttttcctgggctttttaaaattgatagtctatttattacagattcaattttggagcatgttattggtctgttcagggattcaatttcttcctggttcagtcttggaaaggtgtacatgtccaggaatttatctatttgttctaggtgttgtagtttttttgcataaaggtgttcatcatattctccgatgtttatttctatttctgaggagccagtggtaatatcccctttgttgtttctgattgtctttgtttggatcttctctcttttcctctatattagtctagctagtagtccacatttaaaacaaaacctactcctggattcattaatcttttagtttctttgtgtgtgtcctaatctcagtttatctctgattttggttatttctgtcttcttccagctttggggttggatagctcttcattctctagatgttttagttgtgatattgagtggttaaattgagatctttgttactttttgtggtgggtgttcagcaacatcagtttttttctcaacactgatttagttgcatctcagggattctggtaggttgtgtctttgttctcattactttcaaataactttttgattgatgccttaatttcattattcacacaaaagtcattcaggagtgagttatttaatttttatgtaatcatatggtattgagtattggttttctcaacttttacctccaattttactgtactctggtctcggagagtggttgtcataatttgaattcttttataatttctgagaacagttttatgtcgattaagtggttgattttagagtatgtgccatgtggcaatgagaacgtatatgttgttgtttttggtggagagttctgaaagtgtctgttacatccatttgatccagtgctgcattcagatcttgaatatcttgttaattttctgccttaataatctaatattgtcaatgggttgttgaagtttttcactataattgtgtaggaatctaagtctttttaaagacctctaagaacttgctttatgaatttgggtgttcctgtgttgggtgtgtatatatttaaaatgtatatatttaaatatgaatacatatattcttgttgaatttaaccctttagcattttgtaatgcctttttgcctttttaaatctttgttgttttaaagtctgtttgtctaaacttagggttgcaacccattctttctgctgttttccatttgcttggtagatttttatcccgtcattttcagcctatgaaactgattgcatgtgaaatgagtcttgatgacagcatatcattggttctttgttctttatccagtttcccactgtttgccttttaattggaacattcagcccatttacattcatagttagtgttgatatgtgtgcatttgatgctgccattataatggtagctgcttattatgcagacttgtttgtgcgcaactggtctgtatacctcagtgtgtttttttagtggctaataaaggtttttttcacctatatttagttcttccttcaggagctcttgtaaggcatgtcttgtagtaatgaatttcctcagcatttgcctgtttaaaaagaactttatttctcctttacttatgaagcttagtttggccaaatacgagattgttgattggaatttattttcttcaaggaggttaaatattggtattggtctcttctggcttgtaggatttctgctaaaaggcgtacttttacactgataatctttcctttgtggttgacctccctttcctctctagctgcatttgacattttttcttttatttcatgcttgaacaatctgataactatgtgttttggtgattattatattatgaagtatcttactggagttttctgcatttcctaaatttgaatgctggcctctctagccagcattccccaggttggggaagttctcatgaatgatatcctaaaatatgtttttcaaatggcttccattctccccacctgtttcatgaacaccagtgggtcatacctttggtctctttacataatcttatatttttcagaggcttgggggtttttattactcttttttatttctgtctgtatgtcttacttcacataaacagtcttcaaactctgagattcttccttagctttgtctattctactattaatagttgtgaatttcttataaaaaaatttagtgtgatttttttagctctctcaggttagttatgctcttaatactggctcttttgtctctcagctcctgtatcatttcattatgattcttaacgtttttgaattgagtttcaagttacttctgcattttaatgatctttatttctattcatattctgaatttgatttctgtaattttagctatcttggactgatttataaccttactggagaggtactgtgaccatttgaaggaaaagaggaactcaggttttttgagttgtcagaggttttgtgcttgttctttcttatctttctggggtgatatttctttaatatttgaagttgtcaacttttggatttttccttttattctgcttgatgaccttaagggtttaattgtgttataaggttggctcagtcaagtggttttgtgtgtattcatgcaggcgaaggtggctgctcagggctgaggagagtatgctgttttttgtgcttagttgtactcaaatgacagtgttgacaaaggagcagggtgctggtgttgtggggcagatggcctctgtttcccccaagattctgtctgcagtggtggtatagcaggagagggggcctggagtacactcctaccaacagcagtgccagggcagaatgcatatgcacatgtgcactgacaggacagggaaagcaagatccttccatgcacacacacacacacacacacacacaccagcatagtgatgtgtggggtggcaatgggccttggggggaagctgcagtgaggagaggcagcaggcaggctgatgcctggatggggtcaccccactggagctgtctactagtcagacatgatctgccagttcaggatctatgatgcaggcccccagggtactcaaggctgcactgcaagcatgcagggccgaattggggtcgcaggagaggccagcacaccaacgcaagctcaggtcaaaacagccccatctgatgggccaccaccctgcagactttttgtccaaaatttcccctagggctaacgtctcttatgggagcaagttaagcttattggtgtgggcatccctggacatgcttcactacacatgttcccacaataaaccctcttggctgtgcactggctggtgtgctgcccctgtcacttctctaagcagctcttcctttcaactcattttccatgatggtcagagggtctctgccagtgggattccagaggccagtcaggaaagcaggtagctccttgccacttaaactcacctgtttttctcagagtcactgggggccagaaatcagttccactgtgctttagccctgtgcagggttcccagcttctgaatcttaagttcagatgttgtgtctttcctccatcactatcagtacctgccctcggttaagagtgtgccagtcatcctggtcccttggtgtcagctgttccaccttggtttgtctattcagccatcttgctcaaatacacaaagtcttataaatcaataataaatagacaattgactacttgaaaaatgtgcaaggaatttgaattaaaaatttctacagataagaagcaaaatttgtcattaaatttaaaatatgtgacattattagtttagagaaatgcaaatcaaaagctcaatgacatacttactagaagacctgtaaaaggcaataaaaaaggttgccaaagatatcaaaaatatgaaagcctcacacattgtatgtgggagtgtaaaaaacaaccgatttaaagaacaatttggcaattattcaaaatgctataaatagtatcaccatatgactgagacattttactctgttacgtactcaaaagaaatgaaaacctatgactacacaaagaatcagatgtaaatgatcaaaggagcagtatttgtaatagcccaaaggggataaaaccaaaatatccatcaaataataacagaaaaaataacgtgtggtgtgtccatacaataaaatactatgtgccaaacaaagaaaatgaagtaataatacctgctatgtcaggaaaaaacctcaaaatcactaaagtaagtaaaataaaccaaatgcaaaagggcagataatttatgatttcacttaaaataacttttaataaaaggcttatatataaaaacaggctaatgattgcctatgaccagggtaatgaaatcagtaagtacaaaagagattaatttctttttccatagtgataaggtgatttcaaaattagattgtggttatgggtgtctgtaaatacactttaagaacttggaattgtacacttaaaacatgtgatggttttgttataagattatatccctctaaaatgtttccaaatgaaactgttgacttttggagaactaagtcacagactgtaaaaccaaacccatttattgttcatctcaaggcatgttaaataaagaggaaaagacaaagatatagttataacattaaaatcttcatggcaaatagttataagaaaaaaattacaattgtaaaatgtattaatagacataaattacctgcttagatttaccaggccagaaatgtaaattaaataatagtacactattgaagaccactctgagtcactgattattagaaacttgttatgatgtcatcataaggttaaaatattccttatcaaaaatgactcacagcaaaaatgttaaataaagtgtgttagtggcacccctgtccacagttgctggtacttttagtgtatggccaattagaaagctgctcttttgtccctcatttgtaaccaatttcaacactcaaattcaatattgaactcctaaatttattgataaaacatgtgagaagatgtttaaattatatatttaaaagatattatgaaaataaaaaatcttagcaaacatagggagaattataaactaacatttatcatacatacccaccacaaggcttcagcaattctcacattttttatctttcatttttaattatcaacttcaattattctggtaatattttcaagtaagcatattatgttgtcagtttgtagaaatttgagtacctatatctaagaaataaaaagaaaaataaaaatagtactataaaatctaagtaaatacaagtattttctaatattgtactaaagagtttcttgattctttacgtgcaaaacagtagaacttagcaacctccaagactttatgagaaataacaatttaagactaatatttatcctggagactcaaagtgactataaataaatatatctttagttaataaagcttaaaaataaagtattaataaaaacacattttgaagatggctgacacctttgttactagacatggggcttgtgctgtaaataactagtttaaaagtccatggaaaagggattttcaaccaaaaagtctatagaaaacaaaaaattttggtttttctgaactcaggatgtgaggccagcttttaaagcactgaatttaaaaagccctcaagaccctaagcttgataagcacgtcaccagcaggtctcatttttcagctctgtgcaccaggtggcatgtctagcaaaatgtcccctctcatgtcaggttttttctatgaactcagaatgaccactgtcccttagtatgcagccctgcagtggacccaaaaatgacaatcaatcaggtccagagttgctcattatggcctttccagaatgtaattatctaaggacaattctcccccttgtaaaattaagaaagtatcagaatatttgcctaatttttgataacatcatactgtgagccacaaaaaagcaagaatttaaaatgtaagggattatctggatcctagggcacagaaatacacctcaaatagaatagtttcacacacgattttatatgtggacttcctgtgtggaagaaaagaatgtgggggtcaatagtagagaagtctgtatgtagtggaattttaagaaatcagagaggccgatggggttcaggagggtatttattaattatttaggtgcactggtccagtggattaacatccaaagaatgagtcctgaacaaagagttaagttaccttttaagcatttcatgggtggggagagatttgtgcagggagaatcatactacagaagcaagaaacaaagacagttattcaattgagacatgcattacattatttcttacttttcaaggaaaaacctgttttgtgacttgaatttatctgtctagtgaccttgcagcttcacagcttgggaaacagggtcttcacaatccctgggaaaggaggagagataaggatcactagccacagaaaaacaggcagttagtttttaaaggactccagctcttactctttctcaacagaagttgggttttcttacacacaagtgagtttctgcttacacactctttaatctcttataattcctgttccattctccccattggtgctttttataacagaggtgttaatagaaagcaccattatttgccaagtcttcatggagctgagctttttcttcttctggcggtggctgatatctggttaatgcatcaactgtacagactgtacagtagtgttttgggctaccattgcctccatagttgactgaatactcctaataaacagagacaaaaggcaagggaggataaggcagatgcaaagaataagcaagaacctactaatgagggtttagaatttttcaaatgctgagaaccatcctccaaacaaggaatccggggactacctggatcaagtctgaagtggaacctgggccaacttgtgcattctagctgtaatttttatgaccactaatattgatttcttggctattgatttctaggcaacagttggttaaattaaattttctacatattcctccttcggaggataagagataatttaaagccagcctattttgatatatagcatttcctttttgtgttgcttgtattgccaataaatctagtgccctcgatatttcattggttatgatttgaaggactgcctgcaacttcatgatgcggctgaggatatagattatggtgcagtaccctcatgacctgtcttgcacctaggtagctggcccatagcatgtcatgattctttcaggaggtcatttattatctttttagtctcctgtgtccacatcttttttgatatttttgttacttttgtgattatgctttttctagttcttcttttatttttattataaactggatattctaagaatttcccttgctttagaggaattagaaagaaggatggcttgattgcttttaacagacatgtccctgcccattttgctggcagttgccaatatgcccatgctccacagatccaatataggccagagggtgcctttcaagcatttgaatcatctacctgatgccaagtgcagcttagagtaaggaatccagagaaagtgtttggatctggtaagtaggagtcattctgggcatttcttcatagagttttgtttttagtctcgtaataatactgttgccctaggaaggttgtttttcctactgcgtctgtgaaagcctttccccatcgagtgatacagtactttccagttatggagatttttaacaatcaaacactggctgaggctgttggttcactggcagggttaagcaaagtgaagttatcttgtggcattaattcctttgcctcccattgccactcattctccatattagtttctctacatacatagcatgaagaaatttttaagctgccatctgtgttttcagctagttgagcaaataagtttttggttgatgggggaacctcgggcactggctgatcaaaatgcttacagaatgacttggtattgaggggttggatgcatttgagtccttatagtatttttgacaattagtagtggaactccaagacctgctccttgtctatcaactggtaatagtgctgtctgtcctgtagaccaaaaaggtagctctggctttaagatagtaaaatttaaaggatcgcatgtccttgtcttacaatctggtttttaggattatgaacatacgtggcatggcagtcatcaaagaagaaataggccctttttagaagggtgggatttctttggtttgagctataagctttccttctgtttctccctctgatataatatttacctcaaaatagaattaatagggtaagagcccaggctcataacatacatatagctgattatttcctcagtcacagactgaataggtggtctggttgtatatgcatattcctaatttgcttcctgtacattcatagtaggtatggtacagtagagttttaactgtggtattttttatccaggtaatgtgtacacagcatggacatccttcaagagatttatcccctttcagtataagcataaatggtaacaacattgttgtatgtaatagaaacatgcttacactacacatgggcacaaaaactttcctctgggcatagacatttgcagcatttgcagtaataacataacaacggaacaatcagtattgacagaattgtaactatggttataaattgtattcacatttacttatctggacatggtcctcttagcttcggctgtgtgtacactagtcagcttccgggatgtgactagagcagagtttgaagaatccttaagcttcagccatgcttagactgaccagcctccagtgtggtcagagcagggcggttgtcctttttaccggtggctgagatttgccatagggctattcgagtggggcaatctgggtcttgttggctaatccacaggttgtcatcacgactcgctactgtcactggttttagatggctatggtgaatccaaggtgtggcacctgcaactttaacagcagtgggagtagacatgattacaatatggcgcctatcgtatatgggtcctagagtggttgaattccattttttacctaaacgaagtccctaggtttgaaagggtgtactgggtctgttagacttataggcatttttttacatacttaaccatgcattttagtatagccatacttaaagcctgcatttgccttcttaaagttagttttcccaatttacagagattaccctgaatctgatttttctggggggtgggcagctgaacaaaatctcagagggcgaatactcagttttttggtgggggtgcacctgactcataagaggaccatgggcaagacctgatattacttcagatgagtttttcgacaaaatttcttcaacagctgcttgagtgtccagtttatgctctccactttacctgagatctgctacctgtaggctgtatgttatttccattttatttttaatagtcgagttaagtcctgaactattttagccacaaatgttggtccattctctgatcttagagttagaggcagcccaaatctgggaacaatgtctcttaacgccttggtcacgtctagtgccctctctgtcctggtgggaaaggccttgagctatcctgaaaaggtgcaaatgaacaccaatatgtactgatagcccccgtctcagggtcattcagtgaagtccattagcagtttttcacagggcatggctcctttttcctgaactcccatgggccgagtaggatcttgtcgtggattgttccgagtgtaagttaaacacagtttacaaatggcccgagtaatagcaatgagccatggcagataaaaatgatgccttaataatgtctttattttttttttaatctgagttcggtggtggaattgttttacaaatctgggggtcaccatttcaggtatggctagcctcccattgaagaatttgtattatcctctttcaatgtagttcttattttcctggggaagccaagctctgttatttggagtgaagattgggatctccaggaggggaatctccgggaggagaggcatagctaaggcatcttctttaggtggagttgtcattgcagccttctttgcctctttgccttcgtatcttttttagcccttagtgttcttgctttttgctgcctcttgcaggacttcactaccgtcacttttggggcccatacagcgtttaagagctgtaggatttcttccttgtactttatttctttgtttccgcagttaaaagtcttctttttttctttgtaaataaccttatgaacatgcaaagtggcagaagcatatttggaacctgtataaatattggtcttttggtcttttgctagccagagaactcttgtcagagctcttagttctgctttctaatcagaagtttctgtagatgaagactgcacctctactgttgagtctaaagtcaccactgcatacacagcttggcgggctccttttagtatgaaactgcttccatcagtagaatattcaatgtttgggtccctgagggactgatctgtcaaatctctctggcttgagaacacttcatctaccacgtccacaccacaatgaaacggtcctcctggcactgactcgatgagagtaaggtagccggatttagggtattcacagtctctaaagttagtttactagcttcctgcaccagtacggcagtggctgctagtgctttaagacaaggaggccatccaagtgcaacagaatctaattgcctggataaatatgccaccaggcgatgccatgaccttatggcttgagtcagaacccctatggcctccctttcacttgtggacatacaagaagaaaagcttgattagttagatctggcagtcctaaagctggggcctgagtcaaggcttctttgatttctttaaaatccttctcctctttggcctcctagaggaggggctccttttttcctcctcttagtggcttggtatgatggcttgaccatgagcaagaaatttgggttgtaaacgcggcagaaccttgctgctcttagaaactctcttacttgacaccgggtggttggagtagaaagtgcacaaacagcctgctttttttcaggactaagccatctttcctcttggcttatataaaagcttaaatattgacacttttagaggagatttgagcttttttctgacactttttattctgccttctacagcaggtgcagtggttcttgggtttcttctgcgtgtagtagcccttggctggtgtgtgtgtgtgattttttggttctgtttttttgggtttttttggtttgttttttgtttcttttactattgccctgatcattttcattatttctttgacatttatgcttccagtgtctttccttttgcaccatgcacattaatctctctctagcctcggctggccttcacactcctgtccagactagcctttttcatgactacgttcacgcccgcgtccatgcctccttgtaaagccagctcctcttcccggaagggctgctgctagtaagttagcctttcttaagcctgtgatcagccttttcctttgcctcctcatctcggttaattaacaccttggttgtcactttaataagctgagtagcattctcgcctacggagcttgtaacttctgcaatttatgcctgatatctccttgggtctgccttacaagtgctggattcaccctgcactgatttttgagtagcctcagggttaaacggagtgtacaataaaaatgcctcacaaagtctttcatagaacttgctgtgcttttatctgcaccctgaagcatgtctgagatttttaaaaatattgattgcctttttcttttaccatcctttagcctttgcagatgggcttctcggcacctttgtaggtgctgaatctggactgcatcatctgggtcctagtgggggtcctcctgtcctcttaagaggcatgagcatatcttatgcacgaccagacctgagacggcctgcctgattttcgctctcatttcaccttctcgggtgagactggcagcatgtatccatttgaacttaactccttagggacagttaccttggtaaagggggtagattggaatgtaaggaggagcggtctctattcttttctgtggttgttacaaaaccggtttttctgccttttctgagattttttcatttgtcttcagctgctggggcagctgattttactttcacttttggctgggaggtgctacaagcctctgtgtctccttttaactctgtagctgccagagcagctgattttctcttgccgtgagctgcgagcattctacagtaaactgctaggcagggctgcattcatttagccatgagtcaatataaagagtaggtctgaatgtcctggctgttctctgaccctagtcaccaccttaaaacacacggccaatttttctatagtgcctttggcaagccatctgacactaaaacagggctattctaattcacagtatgtccttaacttttgaacactcagtttcatcctataatcacttctaactctttttttaaaattctttattatgcttttcaaaggagccacttttgatgttttcactctcatttcctctcttgcagttcactttcactctgactttcactcttgagtccaccagacctggtcctattgcgggagtttcagatgctgcttagccaggaccatgccttcccctgtcgcagactgctgcagctgtaaagctggtactatcagccatatgaagcatcttaggtctgattttccccacattcgcctcagagcacacagccaccactaagggatctgtgcctccccatgtcgctgcccacattggcctctcccaatgtaacaggaagagctgcagacaaaaccccttggacactgagttaaagaaagaaggtgtttattcacctgggagcttcagcaagacttctttcccaagagctgaaccgtccgagtgagcaattcctgtcccttttaagggctcacaactctaagggggtccgcatgagagggtcacgatctattgagcaagcagtgggtatgtgactgggggatgcatacactggtaattagaaaggtactgaacaggacagggatcttcacagtgcattttttatgcaaataaccgattaggtcaggggttgacctttaactaccaggcccagggtgtggcgctgggctgtctgcttgtggatttcatttctgccttctagtttttacttcttctttctttggaggcagaaattgggtataagacaatatgagggttggtctcctcccttattttccccctttgagactctcactcattttattagtgggagttctcaccttcttcctcactacctatgtcttcctctatcacagattgatagtgattcatgtagtacactcgtgctgaagcgttctggtgaactagagttgccatgaaaacttttaccacttgaatgagtacagctagtaagcaagagatcagtaagcaggttcctattactactatagtttccattataagagttttaaatccttctagtgccgggaaccattttcaaacatggcctcagtgtcaaatcggtgccacacctgtactggcacatgtgccagtttcatcatgtctttaactatatcttcgactacttgcccctgatcatctatgtgcagacagcaagtgggcctaattacagtcattaaattgggcctaattacagtcacaatcaatttactaaaataaccagacagcaagacaggtttccaaacattggcaaatgtttcagggagaaaaaaatgccccactagagaagcatggttgtatctctgtgtgtacatacacacggggccaggcagttctatgcatgatagtctgggactgtaaaagtgactatgcaaacctttacattctgtcacagaacttacaatttaaagtgagcatctttttctgtgacttagaaattgactttttttttttagttgggagccacttttagcaattttccctttgttgatacataataatagtatatatttgtggtgcatgagtgatattttgatacatgcatgcaatgtacagtgatcaaatcagggtaattagaatatccatcacctcaaacatggatattattttctttgtgtttgaaaaatttcctttgtgttgggagaatttaaagccatctcttctatctattttaaaatatactaaaaattagtgctaactgtagttatcctactgtgctgtcagacactagaaattattcctcctatgataaaaagtttaggctgtatcccatgggtagtaggacaccacatgactgagtggtcatctgggaaattatctggatgactttggaacattcctggttgagccaggtggctgttgcaacaaactgtggggaagcccctcccctaatgccccctaagccagctgtcactacatggcaggaaacctccaaacctgagggccccaggaaacaatgacagtccccactcacatgcaacttgtgctgtgctcagtgccctccacattgagcctgatctagctttacccgagggctgtgaggtgggacaatcagtatccctttattttaaaaggctcagtgaagttttgggcttaatgtgagtgaagtgatcctaaaagctgactctgggatcccggctccaccactgaccagtcctgcaggtggcgagagttgcctctcctcccctcgatttcattttgtcctctgtgaagtgcagccgtgctgatgactcacatatcagggatacatgggaactgtcaatgaacggagtgctctacacagtgcctggagctcagaatgcagatgagggaggagggtgagccataattctgagggaagtcccaacataatttagcccttccatctagtagccgggccccagtacagagtcctatgtcagtgacagggcaaactgagaccagctcaaacacagcctcttcctcagcagcagggcccaactaaggcacttggtgttttggttcatttcctgcagcttcaatgtaaagaatattgtgagacatttgctggaacaactgaaaatcagaagaagaagagacagctcttctccatctccctgagagctcttccccagaatgtgtttatccagagaggaggggaaatatttatttttcgtaaatagtaaatgctagagtcgaatattatatgaaaatctcattctactacaaaatcggagttgtggttgtggttctttttatttcacttgtgtaagcttaaatgagatacagactctaacatttctccttgaattatgaaatcctaaagagtcggcagcataatgtatgaggaagaagagaaaagcagtcatagtttctggctgccggataagacacccaggtccatttttctcagagcatatgttcattttaatattaacccaaggaaagagtgaagatagatcattcgaacttgcagaattaataatttgaaggtattttcacaaagcatagcgacagtcttggaaatatagatttctttaaaaagcagttgcagagatcaggaggatgaatacctttctatgattttacaaaaaataaatcaacttctgcttcacttgctgaggtttcctctaagcaactattaggacattgttgttttttcttccaactctggagttgcatcaggtctatgtggaaaaaaacattataaaataaaatgaccaaagtcaaaaggagaaggccagggaaagtctattgacaatggatgcagggcagaaaggaagctgcattctcaatcttcttctggtgtcctgtgattgagcctttaccttagatgtaaatcctcccagagttttgtctcttaccttagaatttctattctttttttaagttagtttcttatctagaatgaaagaattgtaatgccactttatggctacacctgggccttattctgtaaatatttttactacctatgaggtaaaattcccagcattagggcaattctttatccaattttttctttctgagacagagtcttgctgtgtcacccaggctggagtacattggtaaaatcttggctcactgcgatctccacctcctgggttcaagagattctgctgcctcaggcttctgtgtagctgagattacaggcacccagcttcatgtccagctaatttttgtacgtttagtatgtttagcaaattttgtatttttagtttcactatgtttgtcaggctggtcttgaactcctgacctccaataatctgcccgccttggccttccaaagtgctggaattacaggtgtgaaccaattctttttgaggaataaattacctaaaggtcctcaagcctttctgtcaggcatatcttggccttttctctctgactggggtccgatgaatcacaggtgggcactatttttctatattcccaaccagtgataatccttgcgctctttatttctaattaaaagaaatccaaaatggagatagttatttgagaggtctctaaagacaactaggaggacatgaggagttgaattaatactcatacacacccaggtggaattttacctgttcgaactgggaaaattacagatgtcctaaaaaggcaactgcatttgacttggattgtttatactgagcctgatcacaaacctcctggagagaaagctgtgctgaattaagctgatgattgcctagatacagtctaagctggcaatcaaacattgtccatcatagactgtgctaaaatctttcacttgtgtaaacttgcagtaaaactttataagtccctccctaacctcatctgaatggaacatgatatagcttcttgctaaatttgtgtctcccaaatagcaatttataaaaaatcatgattaaaatgc
